United States Patent Application Publication US 2025/0235397 A1 - sequence listing, part 11

SEQ ID NO: 13 - DNA, 3578914 bp, Bacillus pumilus (residues 1,789,458-3,578,914 of 3,578,914)
  source 1..3578914: mol_type = genomic DNA
tttggaaaaaggcaagaggatccagatcgtcaactcttctggagtagcttatcaaaacagcatggttgacgttattcgcttcttctaatgtcgcaagcgcttcctgccggaaagtactttgcactgttgtcaccatgatacattcctccaaaatccatgaaataacataaaaaaataaaaccataatgaaaaaatacatgaacattcgagtatgtcgaatggcctgcttttctattataaaccttaacagatgaacttagtaaagaaaacagcttttaaaacctcgaatccttattatatcacgctttctagattttttcgctcctgcttcttgaaacgagagcatctaaaggaaaaatggcaagtcctgttctaagatcaagctttctctcgatatggcaacgattagcaaacatctttttccggtttcatcgcatcaatatattgacacctttttgaactttgctaaactggaatttggacgtgtacgtatttttttatttaaaggagtatattttatgcagcatcaatcgatatcagatcagctttcaccgattaagcctgataagaactggcggatttggtggaatttactacgaccgcatacattaacagcggcatttattcccgttactttaggaactgttctagcacttccaagtggtcaaatacatgttgggctatttttagctatgctgttggcatctatgtttatccaaatcgcaacgaacatgtttaatgagtactttgattatgttcgaggattggacaatgagaaatctgttggcatcggtggagccattgtaagaaacggtgtgaagccaaaaacagtcctcggcctcgcttatgcactatttgcgctttctttactactaggggtgtatatttgcatgatgtctagctggtggattgcactgataggactcatttgtatggcagcaggctatttctataccggcggccctgtacccattgcatatacgccgtttggagaacttgtgtcaggtgcttttatgggactaggaatcatcttgattagtttctatatccaaacaggcacactgacatctaaagcttttctcgtttcactaccaatttctattttagttggtgccatcttactatcgaacaatatccgcgatttagacggcgataaagaaaatggacgaaaaacacttgcaatccttgctgggcgaaaagctgcagtgaacattttactttccatgtttttggtctcatatgtacttatttttgtttatatcttcacagatattgtcggcctttggagtcttcttgttttactcagtgtgccaaaagcatatacagctatcaaagaatttaagcaaaaagaaaaaccaattgaattaatgaatgccatgaaatctacagctcaaaccaatacatttttcggtttcctgctgacaatcgctttgatcttacaatactatattgcgtaacaaagaacgcctgtagccgcaggcgttttttcatgaggaattgcttcaaattggaactagtcttgcagacaaaattgctcatactaacattatgtttgatatgaaaggatgatcgctttgttgtctaaagacgaattacatcatttgaagcagcgacttctcgatgaaaagcaagaactcgaagctaaaagccatgacgatgaacaaaaagtatcatttccttatgattcgctcggagaactgtcagcctatgataaccacccaggtgatcaagggacagagctattcgaacgcgggaaagatattgcgttaaacagtttggaacatgaacatttgttagacatcaatgaggcacttcaagccatcacagacggctcttatggcctgtgcaaggtctgtaaggcccctattccaaaggaacgcttagaagccttgcctagtgccgtcacatgcacagagcattcaaaagaacaaaccgtttcacaaaaccgtccgattgaagaggatttattaagtccgccatcaggtcaatttgaaaatgaagaaagcgcagcctacgatggagaggatgcatatcaagacgtagaacgctatggaaactctgataccccgtccgatatggaattccctccattgacatacgatgatgtgtatacgcaatcagaagatgaagattatgtggagggctatgaaggattcgcagcagctgatattgagggcaaggcaagcaaggtatatccaaataaagcccacgaagcctatgaagaggcattagacgaagaaggtgtcatgacggtatttggtgacttgaagccgtacgaagaagaaccttatacagaagaaaatcattagtcccctcatattgggggctttatgtttatatcatgtaatgattgggaaatcactttaagagtgaatttgattggaggagattcttaatggcaagaaaaagtatcatttgggcagtggttgtcttctttattacatatgcattattctctattgccggattcttgtttccgattgacagagagtggtatgatacactgaataaaccagaatggacaccaagtggtggtgtaattggtgctgtgtgggctgtcttatttgctctgatctcgttgtccgcagcgatcatttatggaaagtacggatttcaaaaaatcactttaccattttggattctttttcttttaaattacgtatttaatcaagcctttagcttttttcaatttacacaaaaagatttatttgccgctacgatcgactgcctgcttgtagcactgacagcacttgcacttgtcatcgtctcgcgtaaactaagcaaagtcgttccaattttactgatcccttatgtcttatggggcttctttgcgacatacttgtcttatacgatctattccatgaatatgtaaaaaaagaccgctatgatggcggtctttccttttgaagaaaataaaaaagagatctttgacaagacctcttttaaacatgacccgtacgggattcgaacccgtgttaccgccgtgaaagggcggtgtcttaaccgcttgaccaacgggccagataaatggcggagaaggagggatttgaaccctcgcgccgcttgcgcgacctacacccttagcaggggcgcctcttcagccacttgagtacttctccatttggctccgcaggtaggactcgaacctacgaccgatcggttaacagccgatagctctaccactgagctactgcggaatatcatggtgggcctgagtggactcgaaccaccgacctcacgcttatcaggcgtgcgctctaaccagctgagctacaggcccatgaacggatatacaaatggagcgggtgatgggaatcgaacccacgacatcagcttggaaggctgaggttttaccactaaactacacccgcaaaaatatgtatggggcgattgatgggaatcgaacccacgagtgccagagccacaatctggtgcgttaaccacttcgccacaaccgccatactgtcaatatttttttataaaagtgccactctcttaaagcgaccacttaaatatatcatgtatctctatcaacagtcaacatttttcttaaaaaacattttgtttttttaagaagtttttactgagaatgagataaaaatagagcctctttttgctcctttgaaagattaacacatatctatgaaaaaagcattataaatttcaaaaaaaatgatgttttttcaaaaaaaaataaagccggtgaagaaccggcttcattttactcaggttgctcttgatctgactctatattttctacgttctcttcactaatctcttcatcgtcttcttgtgattgttcaactaatgccactgtagcgacatgttcctcatcaccgaggcggattaggcggacaccttgagtgactcgacctgttgtcgaaatgtcagaaacggccatacgaatgattacaccgcttcctgtaataatcatcaagtcttcttcggcttcagcattagttgccttcactgtgacaagcggaccattgttatcagtgattttgcacgttttaagacctttacctccacgactttgaacacggtattctttttcaggggttagtttgccatatcctttttcagttacaatcaatacgtttgcatctggctcaaggatttccatacccacgacaatgtcatcttcggaaagtgtgatacctttcactccagctgccgtacgtcccatttcacgaacatctgtctcgtcaaaacggatcagcatcccctttttcgttccaatgatgatttgtttttctccattggttaaacgaacagccatcagttcatcttcgtcacgaaggctgagtgcaataagaccgttgtttcgaatgttagcaaactgagacaatgtcgtccgttttgatacaccgtgtcttgttgtaaagaagagatacgaattttcatcaaattcgcttactggaataatggcgttaatccattctcccttttctacttcaagaaggttaatgatcggaatccctttcgctgtccgtccgaattcaggaatctcataccctttcgcacgataaaccttccctttattagagaagaaaagaatcgtatcgtgggtcgatgttgaaatcaactgttcaacgaaatcatcttcgttggttcccattccttggacacctttaccgcctcttttttgactgcggtatgttgatgcagggagacgcttgatataaccattatgcgtcagcgtaatcacgatgttctcaacaggaatcaaatcttcgtcttcaattgtttcaatacccgctgtcacaatttcagtccggcgcgtatcattgaagcgttctttaatttctgttaattcttctctaatgatttcaagtactttctcattgtctgctaaaatggcttttaattcagcaatcaaatcaacaagtcctttatattcatcttctatcttttctcgttctaggccagtcaaacgctgaagtcgcatatcaagaatggcctgtgcctgtttttcagacaagctatagttttccatcaaaccatttctcgcaatttccgcagtttgagagcctctaattaaagcaatgacttcatctaagtgatcaagtgcaattctgaggccttctaaaatgtgtgctcttgcttctgctttacgcagctcatacgccgttcttctgcgaatgatcactttttgatgctctagataatactcaagacattgtttgagggacaagactttcggctgtccatcaacaagtgctaataagttgataccaaatgacgtttgaagtgtcgtttgtttataaagattgtttaatagaacatggacgtttgcgtctcttcgcagttcaatgacaatacgcataccattacgatctgattcatcacgcaaatctgtaatgccatcaatctttttatcacgcacaagatcagcaattttttcaatcaaacgggctttgttgacttggtacgggatctcattgataacaatgcgctgttttccgctagatgtttcctcaatattcgattttgctcttaatgtaatagagccgcgccctgtttcatacgcctttcgaataccacttcggccaatgatttgacctgctgttgggaaatctggccctgggatgatatccataagctcctgtgttgtcatttccgggttttgactgatggccaataccccatcaatcacttcacctaattggtgcggcggaatattggtcgccattcctacagcaattcctgtcgctccgttgaccaataagttcgggaatcttgcaggcatcaccattggctctctttcactgccgtcatagttatcttgataatcaatggtgtcctttgtgatatcacggaggatttccatagaaatcttcgatagacgcgcctcggtataacgcatcgccgctgctccgtctccatcgactgaaccaaagtttccatgaccatcaactaacatataacgatagttgaagtcttgcgccatacgaaccattgcttcgtatacagcgctgtcaccgtgagggtgatacttaccgataacttccccaacgatacgtgcagatttcttaaatggtttatcacttgtcatacctaggtcattcatcgcatacaaaattcttcgatgcacgggctttaatccgtctcgcacatctggtaatgcacgcgacacaatcacactcattgcataatctaaaaaggacgtacgcatttcttgactaatattcacttcgcgtacatttggtgtatgttgttcactcactataagaacctccctttacgtatcacatgaaataaattatgtgggagtaaaatatgtatttatcttcacaagactattctccattatatcaataatctcgtctttatacacatttatttactagaaaatcaacgaaaacacggaaaaacaggacattggttatacgcccctatttcttgaaaaacaaccttattccaaacaagaaataaggttgttctcagtagggatctatctaaatatcgaggtttttcacgtattgcgcgttttcttcgataaagtttcttctcggctctactttatctcccatgagcatttcaaatgtctcatcagcatcgatcgcatcctcaagtgtgacttgaagaagtgttctcgcatcaggatccattgttgtttcccaaagctgagtagcattcatctctccaagacctttataacgctgaagtccaggttttggtgtttgaggaagtgattttaacagctcatctagctgtttgtcgttatacacgtactcaacacgttttccttgctgcactttatataaaggcggctgtgcaatatacacataaccgttttcaataatttcacgcatgtagcgatagaagaatgttaaaagcagcgttcgaatgtgcgctccatccacatcggcatccgtcatgatcacaactttgtgatagcgagctttctctaaagtgaagtcttctccgattccagttcctaatgctgtaatcattgaacgaacctcgttgttcgatagaattttatctagtcgcgctttttcaacgtttaggatcttccctcttaacggtaagatcgcttggaagtgacgatcacggccttgcttagcagatccgcccgcagaatctccctctacgatatagagttcagagatggaagggtctttagaagaacagtccgccagtttacccggtaagctggagacttccagtgcacttttacgtcttgtcagctcacgtgcctttttggcagccattcttgcacgagctgccatcacacctttctccacaattttctttgcagcatcaggattctctaagaggaatttctcaagtgcttcagagaaaagggagtcggtaatggttcttgcttctgagttcccaagctttgtcttcgtttgtccttcgaattgaggatctggatgtttgatggagataatggctgttaagccttctcgcacatcttcaccgctcaaattcgagtctccatctttgaatacgccatttttacgagcataatcattgataacacgcgtcaaacctgttttaaagcctgcttcgtgcgttccgccttcatacgtgttgatattgttggcgaaggaatagatgttgcttgaataggaatcgttatattgtaatgccacttcaatcgtgattccgtctttttcaccttcgatgtaaacgggttcttcatgaacgacttcttttgagcgatttaaatgttctacatagctcttaataccgccttcatagcagtattcatttcgtcgttctttaccttcacgtaaatcttcaataatgatgtttacaccttttgttaagaaagctaactcacgtacacggttggcaagtgtgtcgtaatcaaattcaatggtttcagtaaaaatttctggatctggcacaaaatgagtggttgtccctgtaacatctgtttcaccaatgatctctaaatctccagctggaacaccgcgtttgaattgttgataatgaattttcccgtcacgatatacggtcacgtctaaggtcgtagataacgcattaacaacagatgcccctacgccatgcagaccgccagatactttataaccgctgccgtcaaatttaccgccagcgtgaagaacagtcataatgacctctacagcaggacgtcccattttctcatgaatcccaactggaatcccgcggccattatctttcactgtaatgctattatccttttcaatttgcaccgtaatatctgtgcaatatccagctaaagcctcatcaatactgttgtcgacaatttcccatacaagatggtgaagtccttttgcactggttgacccgatgtacattcctggacgttttctaacagcttctagtccttcgagcacctgtatctgattttcatcataactattatgttgctgttccattgccacgtacattcacctacacttttcttaaacgatatatttatatgaattgagcttttagacttcaatttcaatcacaaatgaagcacgttttttgagcgtgcttgaggaaagaggagagtaataaacagattcagttgtgacgacgatggatttgggtgttccttgtgataacgaaatgatttgttcttcttgtttttggagaaactcttctacaacagaagacgacctcattttgtaatcaacaattgcgacaatctctcgtgtagaaacaacacaatcatcacctaaatgaatatacaagactcacacctcatttatcagtcaattacttttccactggctactctgaaaatttccgcttctttcaaggtggcgtgatcgatgccttcaacacttgttgtggtgacgaaggtctgtacacgtccctgaatggtatggagcaaatgagactgtctgtaatcatcaagttcagataaaacatcatcgagtagaagaatgggatattctccgatttcttcatgtatcaggtcgatttctgccagctttagtgaaagagctgttgttctttgctgcccttgagagccatatgtctgaacaccccgaccattcacaaagaaaagaaggtcatctctgtgaggtccccacagtgtcactcctcggtctatttctctgtctcttagtttctgaaacgattcttcatagctattctttattttcgacaagtctgacgcttctgatacctctatcgaagtctggtattggagcgtgagtgtttctagctctctagaaatgccaaaatgcaacggctgcgcccatttctcgagctgtttcgtaaaagtcagtcgtcttttgacaactttcgctgccgcatcaatcaactgctctgttaaaacctccagcatcgcttgatccgtttgctttcttgtctgcaattgtttcaagtaatgattccgctgagagaggattttttgatagagcgataaatcatgcaagtagacagccgaaacttgtccaatctccatatcgaggaatcttctgcggatttgcgggctgcccttcacaagacttaagtcctctggtgcaaacatgatggtgtttaacgcaccaacataatgactgagcttctgttgttcaatgtgattgaccttgccctttttccctttttttgagatcacgagctgcattgggagtggaccattttttttgatgactctaccttctattttagcatagtcttggtcccatcggataagttctttatcatttgacgtacgatgcgactttgccatcgacaatacgtagatcgcttccatcaagttcgttttaccttgggcattctcaccgatcatgacattcaccttgttgtcgaattgaagctcagtgtgttcatagtttcggtatgaagttaacgccagactttgaatgtacatgtattgtcacccgtttctaattcacaacttgaaatgtgccataaccttctatctcgacaacatctcctgggtatagtttgcgtccccgtctattatctggctcttgattaatgaacacctcatgttcacttaaaaaccatttcgccattccgccagattggatgacttcggctaatttcaaaaactgccctaatgtaatcatttctttctcaatggttataagattaggcattatatcgacctctttcaatatcactaatatctaattgtactaaaaaacaagacaagaaggaaagggggaaagcgaactaggatgaaagaaagcatggtaaacgagaagaaaagctgctgtgcactcacacagcagctaatttagattggattaatatgttctgactgggagaatcaactgcaagattgaatcatcatttggcgtgcgcaacaggaacggtctcatggcaccagtgaagcttacatgaatttctgttccctctaatacttttaacgcatccagcatatattttggactgaaggagattttgaggtcctcccctttaatgtcatctgcttgaaccgtttcgactactttaccgatttcaggtgaattagaagaaatctcaaggctttgttcaggatcagccgacagctttacgacattattgcgtccttctcttgccaaaagtgatgcacggtcaatggcttgaaggaattccttcgtgttgaccacgacatccgttttactttcctgcgggatcaggcgagctgtatctggataattaccatccagcaatcttgagaagaataacacgttttgtgctttaaagagaacttgcgtttctgtaatcacgatgctcacaagatcttgtccgtcatcaaggattctacttagctctgttaaactcttccctggaattacaacattgtatgagctttcctcgtcaatatccaacttcgcttttcttaaagcaagacggtggctatccgtcgccgtgcatattaattcacctttctctaccttccagtttacacctgtcaagataggtcgtgtttctgaggtggacactgcaaaaacggtttgacgaattaagtttttaagcaaatctgtcgggacttgaaatgcatgatgctcttcaatttgcggcagatgcggatattcctcagcatctaagccgtttaagttaaattccgctgaaccagaacggatgatcgtgaggtgattttgttctacttcaatttcgacagtagccattggcagtttcttcacaatttcactaaagaagcgggcctgaagcacaatactccctggacggtcaatcgtgattacttctaaatctccatctctttgaggaataaaggattcaattgagatatcagagtcgcttcctgtgagagaaaccccctcatcagatgcaacaattttaatccctgtcaaaataggtatcgttgttctagaggatacggcctttaatacatcttggacactttcgacaagacgatctttttgaatcgtgaatttcatagtggtcctcctaaattttcttaatgacatgtatatatattttattaataaaaatcgtagaagtaatagtagggcttgtgaatatgtggataagtcggtaaaaagaaaggaaagacagcctatccacatgtggacagactgtgtatgactatgctctagttattcacattttcccgtacttattatatcagcttggttattttaattgttctttgatttctttcacatgctgctgaagctgttcatcctcaaccattaatttcgaaatcttctcatgagcatgaatgacagtcgtatgatcacgacctccaaattcttctcctattttaggcagagaggaatcggtcatttctctagagagatacatggcaatttgtcttggataagcaactgacttcgtacgtttcttcgctttgaaatcctctaagcgaatattaaattgctgccctacaattctttgaatatctttaattgtaatgactcttggcttcgatgaaggaatgatgtcctttagggcctcagctgctagatccgcattgatgtctttattgattaaagaagagtaagcaacgacacgaatcaaagcaccctccagttcacgaatgttgctgtcgatttgattggcaatataaagcatgacttcattcggaatgtctaagccttctgcttttgccttttttcgcaaaattgcaatacgtgtttctaaatctggcggggtaatgtctgtgattaagccccattcgaatcgagagcgtaatctgtcttcaagtgtcggaatttctttcggcggccggtcactagaaatgacgatttgcttactttcttcgtgaagtgtgttgaatgtatggaaaaactcttcttgtgtttgttcttttcctgctaaaaattgaatatcatctatcaaaagcacatctacattccgatagcgattacggaaatcgacagctttgttgtctcggattgagttgataaattcatttgtaaatttttcagatgatagatagaccactttggctgatggattatggtcgatgacataatgaccaatcgcatgcatcaagtgagtctttcctaaaccaacgcccccataaataaagagcgggttatatgcttttgccggtgcttccgcaactgcaagtgaagcggcatgcgcaaatcggttgcctgaaccaataacaaaagtatcaaatgtatattttggattcagcatattttgtggaatatcaacggcctcttctttagacatttttttaattggagactttggcatggcttctacttcatcctgattttgaggaataataaatttaatgctgagctcttcacctgtcagttcgtagatggtatcagcaattaagtggagatatcttgattccagccagtctctagcaaattcattaggtgcagtaattgtaagcgtatcgccttgaagagaatgggcttttgtcgatttcatccatgtctcaaaactgggtttgctcagctttgtctctattttttgaagtgctttattccacagatccaaaatattttccataaggcttctcccccctccttttctttataaaatgaccaatatcaaactgttatagaacacgaaaaagagcaaatggtcatcaccattcgtgcacatacgttgttgaaaacaaataatatagtagaaaaacgtcttttcgacaaattacacagtctgtggataaataattcaacagcctgtgtaatatctttccacagcttatccacaatttgtggataacgcaaataggtcagataagtaattaagagttaaaacacaaatataatatcaaaataaacaagatggtgcaatgggtgtcacaaacttatccacacactttacatcctgttgaaaaataattatccacatcggttatttgtgtgaaaaaaatgtcgataatggatgtggatagtctaaatatgccggaaaaatatccacacccttgttttgcaggccttttaggaggaaaaaagaataaaatgctggaaactgaaaaagaaggtttcttcgtttgataaattatgttatgcttataaggttgataataagagttttatcattgatattgacaatcgatgggttacacaaatataatgagttagactgtcttaaacagctattcctcagggaggtgtcataaatgaaaagaacgtttcaaccaaataaccgtaagcgtagtaaagttcatggcttccgcagccgtatgagttctaaaaacggacgtctagttttaaagcgacgccgcagcaaaggtagaaaaaaattatcagcttaggccactgaataatgtcagtggtcttttttacataaaatcgtaaatgaactgtcagtttttatcggagtggaagaaaacatgaagaagcgaaacaggctaaaaaaaaatgaagagtttcaaaaagtgttcagaaaaggtcaatcaatggcgaatcgtcaattcgttatttaccagctggatcaaccaaatcaagatgaactgcgtttgggattgtctgtcagtaagaagattggtaatgcagtgatgagaaatcgaattaaacgactgatccgccaggtgtttttagaggaaggtcataagttaaagcaagaaaaagactacattgtcattgcaagaaaaccagcaagtgaattgacctttgaagaaacaaagaagtctctccaacatttatttagaaaatccgctgtttatcaacaacaaccgaaaaagtcttcgtaatagaaactttcgttgaatcaatttttaaaagcgcttccttcatctagtgaattaaaatgaaaccaccactttgtaatgaaaaaatgttaccatactgattaggtgagtcactttcgtaatcaattccaacttaaataaagtttgaagtaatgggaggaatcttgttgaaaaggcgattattactaatatttagcttgattggcgtgttggttctattggcaggatgtacacaaatcaatgaaccaatcacatcagatagtaagggattctggaattcttatattgtttacccgctatctcaattaatcacgtacatggcaaatttgactggtgaaaactacggggttgcgatcattattgtgacactgttaatccgcttgctcattttaccattaatgattaagcagttaagaagtacaaaagcaatgcaagcattgcagcctgaattgaaaaagcttcgtgaaaaatatagctctaaagaccaaaaaactcagcagcagcttcagcaggaaacaatggcccttttccaaaaaaatggcgtcaatccattagctggatgtttcccgattttaattcagatgccaatcctaattggtttttatcatgcgattatgagaacagcagaaattaaaaagcatacattcttatggtttgacttaggcagtccagatccattgttcctattaccgatcattgcgggggtagctactttcattcagcaaaaactgatgatggctggaaatccttcggacaaccctcaaatggctatcatgctatgggttatgccgattatgatcattgtatttgccattagtttcccagcagcactttcattgtactgggttgtaggtaacattttcatgatcatccaaacattagtgattaaaactcctcaagtaaaattggatacaaaagaaaaagctggcgggaataaaaaatgaaggaaataactgctgtcggtcgcacaatcgaagaagcagtagattccggacttaaacaaattcagcttctaaaagaagaagtagatatcacaatagttgatgaaggaaataaaggtttcttaggattatttggcaaaagacaagctgtagtcaagttgatagaaaagagaaatgctcttaaattagctacacagtatttagataatattgttaaatcaattgatcctaaagcgaagattgtttccaaaaaggaaccgaaaaagatttctttccacattgatggagataaaacgtcattaatgattggaaaaagaggacaaactttgtactctttagaaacattggtacagttagtgtttaatcgctattctgatcagtatcatcatattaccattgatattggagattataggaaaaagcgacaagaagcacttgaacaatatgccatcaagacagcaaacagagttttaaaaacgaagagaaaggttcatttagaaccaatgccttctaatgaacgaaaagtaattcatgatacgatcgccgcattttctaaagaacttgcaacggcatcggaagatacaggcagcaagcgtcatgttgtggtgctgtataaaaaataacagaaaggctagaattcagcaaagctggattttagtctttttttattgaaaaattgtctttctatagaagattcatcctttatttctaaaaaattagtgtgtgatatgagtggaaaacgccatttttacaagtaagcaaagggatcagggcgtttaaatttattggatttcggtgtaagatgtgaaggtaagtttagaacgtcgttattcacatgtggataagttaagtgttaaaatagataggatgcaaagctgtggataattagatatgggatactttcacttcgctttcatttatggtatctttaaattttggattaagcgtttttaatatagagatggacaacgtccatttaatagataaaagactgtctattaagtagagaaagaggtgattgagtgatggatacaattgcagccatttctacaccgatgggtgaaggagcaattgcgattattcgtttaagtgggcctgatgcggtacagatcgctgatcggatgtataaagggcctaaggagaaaaaacttgtatcagtggattcccatacaattcattatggtcatattgtggattcaagtactgatcaagtaatagaagaggtcatggtgtcagtacttcgagcgccaaaaacatttacgagagaagacgttattgagattaactgccatggcggaattgtaacggtcaataaagtattgcagcttgctttaagagaaggagcaagattagcggagccaggtgagttcacaaaacgtgctttcttaaatggaagaatagatctttcgcaagcagaggctgtcatggacttgattcgggcaaagactgatcgtgcgatgaacgtagcaatcactcaaatggagggacgtctctccggtttggttcagcgactgcgcggcgagatcctagaaacactggcgcatattgaagtcaatattgactaccctgagtatgacgatgttgaagaaatgacacatcgcgtcttagtggaaaaagcgacatcggtcaaaaaagaaattgagtcgctgctctcgacttctcagcaagggaaaatccttcgagagggcttatccactgtgattataggaaggccgaatgttggaaagtcttccttgctgaatagccttgtacaggaaacaaaggcgattgtcacagatattcctggaactaccagagatgtcattgaggaatatgtgaatgtaagaggtgtacctcttcgtctagtcgatactgcgggtatacgtgagactgaggacattgttgagcgtataggggttgaacgatctagacaggtcttaaaagaagctgacctgattttacttgtgctcaattatagcgaagaattatcagaagaagatatgaagctttttgaggctgtctcaggtatggatatcatcgtgattgtgaataagacagaccttgagcctaagcttgatgtagaaaaggtcaagcagttagcgaaggatcgtccggtcgtcaccacatcattattacaagaaaagggcattgatgagcttgaaatggcgattcaatcactgttcttcactggatcaattgaaagtggagatttaacgtatgtaagtaatacaaggcatattgccctccttcaggcagcaaaacaatcaattgaggatgctcttgaaggcattgaaatgaacgtaccgatcgacattgttcaaatagatttaacacgctgctgggaacagctcggtgaaattataggagatgctgttcatgaaagcttgattgatcagctattctctcaattctgtttaggaaagtaaagggaggaacataagaaatgggttatgaagctggcaattatgacgtaatcgtcgtgggtgccggtcatgctggggttgaggctgctcttgcttctgcaagacagggcgctaaaacacttgtattgactatcaacctcgatatggttgcttttatgccatgtaatccgtccgtaggcggtcctgcaaaagggattgtcgttagagaaattgatgcactgggcggagaaatggcacgaaatatagataagacgcatattcaaatgcgcatgctgaatacggggaaaggacctgctgtccgtgcgttaagagcgcaagcagataagttccaatatcagcatgaaatgaaaaaaacaatggaaaatgaaccgaacctgacaatgcttcaaggtatggtggatcatttaattgtagaagatgatgaatgtaaaggtgtcgttacccaaacaggagcaaactatcgtgcgaagtctgttgtattaacgactgggactttcttaaaaggccgcattattttaggggatctatcgtattcaagtggtcctaataaccagcagccatcaatcaaattatcggatcacctagcagagttaggattcgatttggttcgctttaaaacaggaacacctcctcgagtgaatagtcactcgattgactatagtaaaacagaaattcaaccaggtgatgatgttccgcgggcgttctcctatgaaacggttgaatatattacagaccaactgccatgctggttaacatatacgagtttagaaacacatcaaattattgatgagaatcttcaccgttctccaatgtattcaggtatgattaaaggaactggtcctagatactgcccttccattgaagataaagtggttcgtttcaatgacaaaccgagacatcaaattttcttagagccagaaggtcgtaatacgcaggaagtgtatgttcaaggattgtctacaagtcttccagaggatgtacagcagcgcatgctttccaccatcccagggctcgaaaatgtacaaatgatgagagcgggttatgccattgagtatgatgcaattgtgcctactcagttgtggcctacacttgagacgaagaaaatttctggattatatacagcgggccaaattaatggtacatctggctatgaggaagcagcaggtcaaggaattatggcaggtattaatgcaggaagaaaagcattgggtaaagaagaagtcattttaagccgatctgatgcatatatcggtgttctcattgatgaccttgtcacaaagggaacaaatgaaccttaccgtcttttgacatcccgtgcagagtatcgtttgcttcttcgtcatgacaatgcggatttaagattaactgaacttggctatcatattggattaatttctcaagaaagattccagacattccagcagaaaaaagaagccattgaagcagagaaaaaacgtttatattctgtcatcatcaaacctacagcagagacacaagaatttattcgttcacttggtggaagtgagctgaaggacggtattcgtgcaagtgatttgatgaagcgtccagaaatgaactatgaatctgttgtgacgttagctcctgctgaaacaccacttccttctgatgtgtgtgagcaggtagagattcaaattaaatacgaaggatatattgaaaagtcactccaacaagttgaaaagctgaaaaagatggagaacaaaaagattcctgatcgtattgattatgatgccatcaaagggattgcaactgaagcgaaacaaaagctgaaagaagtccgaccgctttctgttgcacaggcttctcgtatttcaggcgttaaccctgctgatatttctatccttttagtatatttagagcagggacgtattgcgaagatagcagaatagaaaggatgtcggcatgaacattgaacaatttacagcagcactagaggagaaagggatgactctttctcctgtgcagcttgaacaatttgaaacttacttccgcatgcttgtagaatggaacgagaaaatgaatttaacgtccattactgaaaaggaagaagtgtatttaaagcatttttatgattcaatttcagcagcattttttattgattttcacaaagtgacgacgatttgcgatattggagctggtgctggtttcccaagcattcctcttaaaatttgcttccctcatctacatgtaaccattgttgattctcttcagaaacgaattacgtttctcaatgagttagcaaaagggttaaacttacaagatactactttttatcatgatcgtgcggagacgtttggacaacgtaaggaaaagcgtgaaagctatgatcttgtcactgctagagcggttgcgcgtttatccgtcttgagcgaactatgtctgccccttgtaaaaaaggaaggattgtttgttgcattaaaagcatctgccgctgatgaagaaatgcaagcagggaaaaaagctgttactgtcctcggaggagaggttgttgaaaagcattcctttgttcttcctttagaagaaagcgaacggaacatcattgtcattgaaaagaaaaagcaaacaccaaaaaaatatcctagaaaaccaggaacacctaataaatcaccaatagaaggttgatcatgtaaaaggtcggtttttcttcaatatttaagattttacagaaggaaaaaacatgagaaaatagaattataaaaaggtagtttttaaaggtggtgtaggttcatgaagcattcactctcacgcttcttcgggcttggtgacaaagaacatcctgagcgtgaaaccgaaatagaggcagagattgctgagcatgatacattaaaggaagagatacaggagctcccggtcgacacaattatgccaaaccgttttcagccacgcaccattttttcagaagaaaagatacatgagctggccacgacgattcatacccatggcattatccaacctattgttgtcagaccaacagaagaagaaggtaaatatgaactgatcgccggcgaaagacgttggagagcggtacagactcttcaatgggagaaaatccccgctattataaaagactttactgatacggaaacggcatctgtggcattgattgaaaatttgcaaagggaagagctgtctgctattgaagaggctcatgcttatgcacgtcttttagagcttcatgatttaacacaggaggcgcttgctcagcgtttaggcaagggacaatcaactgttgcaaacaaattaagacttttaaagttgcctgaagaggtacaacaggccattttagagaaaaaaatctctgaaaggcatgcacgttcacttgtacccctaaagcttccagaattacaaatcgcgctattgcaggaaatcatcgaaaagcagctgaatgtaaaacagactgaagagcgtgtagtgaaaatgcttgaacaaaaaacagatcgcaaaccgaagccaaaacgtaaggcgtttagtcgtgatacacgaattgcgatgaataccattcgtcagtctctccatatggtagaagacagcgggcttaaaataaataccgaggaagaagagtttgaggaatatatccaattaacgattcggattcctaaatagaaaaaagctgatgagagccactcgtcagctttttttattggttccacattatatttacttattattcataaattggtaaaatgtgattttcatagaagaaaggaggtgacatgactcgatgaaaatgaaaaagacgaaatttgttattatttgttatttactattttctttttctctttttacaaatgaaacaaccatatttgctgtgaattcgccaacggctcctgcagaagaaagcccgctggccaaaaaagaactgaacgttctgaagaaacaaggtgttgtttctaaggaggtcactttacagcaattaaatcatgagcatgagtctcaggacgacacaattgacttgatttcagctgaggatgatttgaaggattatggcttacaacaaaacaagcaggatgagttggtaacggatgaaaagccgcacaccatcaagcaccttttaggaaagccgtatcctggtaccgatattatgcctaaaaaaggagatatattggtgacaagtactgatgctttgaagggtatcgttggacatgcaggtatcgtcattaatgagaaaagctttgcttctattccagggtttcgacagcatcctcagcttgattccattcttaactggtttcgctataatgccaatacaaaggtaattcggattaatcaagaggaaacagcagacctggcaggggaatgggcgcacgattatgtgaaaactcatccaaaggctcgatactccatcaccctgtcaattcaatcactggacccgacttattgttcaaagattgtgtggcaggcctatgccaaaacaggtgacgctttgggacatgcgacatataccattaaaaccccctacggattcttaaaaaagagaagctatcatacagtgactcctaaagtcattgtgaacgaaggccgtaaaattggtggattacatttttgacatgtgcccctcacttttgatgaaagtgagggttttttatgcttgtcttttccaccaaaaagatatatcgatatattttttaatccgttttggttcgtcctttcatgtacgaaaatagacatttgctgacgaatatataatagagaaacaaaaaaagcaaacgtttcatactttttttgatagaataggaagtatgaataaaatgagaaacttgttaagttgaaagtgggtgacatcgtggggaaaatcatagcgattaccaaccagaagggcggcgtcgggaagacgacaacttctgttaatttgagtgcgtgtttagcatacataggtaaacgagtgttgttagttgatattgatccgcagggcaatgccacgagtggtattgggattgagaaggccgacgtagagaagtgtgtgtatgatattttagttgatgatgcagatgtccttgatgtgattaagacgacagaggtcgaaaatcttgatgtcattcctgcgacgatacagcttgcaggggctgaaatagagcttgtgcctacgatttcacgtgaagtgagattgaagagagcacttgaatctgttaagcaaaattatgattatatgattattgactgcccgccatcactcggattactgacgattaatgcgttaacagcatccgattccgttttaatcccggtacagtgtgaatattatgcgcttgaaggattgagccaattgttaaacacagttcgtctcgtgcagaaacatttaaatactgatcttgccattgaaggtgtcttgctgacaatgcttgatgcacgaacaaatcttgggattcaggtcatcgaagaagtgaagaaatactttagagataaagtctatcagaccgtgattccgcgaaatgtgagactgagtgaagcgcctagtcatgggaagccgattatcttgtatgatccacgttcaagaggtgcagatgtctatttagacttagcaaaggaagtggatgcgaatggctaaaggtcttggaaagggtattaatgcactatttaaccatgtagactcaaatgaagaaacggtcgaagaaatcaaattaaaggatttgcgtccgaacccttatcagccaaggaaaacgtttgatgatgatgcattgtctgatctgaaagaatcaattcagcagcacggtgttttacagccgatcattgtccgtaaatcgattaaaggatatgacattgtagcaggagagcgccgttttcgtgcagcgcaacaagctggtctgacaacaattcctgcgatcgttagagaattctcagaaacgctgatgagagagattgcccttttagaaaacctgcagcgcgaggatttatctccattagaagaagcggaagcctatgcttccttactagatcatctaagtgtgacgcaagaggaattagcgaagcgattagggaagagcagaccgcatattgcgaaccatctccgtcttttgactttaccggatgaagtacaaaagctgattgcagatggaacattatcgatgggacatggaagaacattgcttagcttgaaaaacaaaaataagctagcgccattggtaaagaaaatcgtggatgaggggttaaacgtacgccaggttgagaaacttgttcagcagttaaacgaaaatgttccacgtgaaacaaagaaaaaagaagcaccaaaggatcgagtgttgaaagaaagagagtctttcttacaaaactactttggcacttcagtgacgatcaagaaacagaagaaaaaaggaaaaattgagattgaatttctctccaacgaagatttagaaagaatcctcgaattgctttctacgagagaatcatcagagtgaccatcttgatacgagatggtcttttttatattctcccagtgatattttgaataggagcgaaaagggaccggtttttttctcttgtccaatccatttgatcgatgtgagatagaccttcagaaagtgtattggccatagacatgacaagatgaagacgtgtgttttggagaacgaagtattccataaaaccgctcacattgacgattccattaatatgaatatctcctacctctggcagctccttttgtacacccgccccaggctttaacgggccatctccaatttggaaggagcctacacttttcactcttcctaaacaggcatcaatcgctacaataaacggatgtttatgagcttgttcaatttcagcgagcttttcttttaaattgaccgcatgaactgggtcagagagcgttccatatacatgaagctttttcaaatcaagacctgaaagttttgtaccaacaagtggacctagagagtcgcctgttgagcggtctgttccaatacaaacgatggcaacgggtctttttcctgctttctgaagatgcgagaataaaatacttttaagctgttgaatggcgtttgtatccgtatgggacacgtattctttcaccctatttctaaaaaaaagaccgttcttgctattcataggtctcacttccttgtcatagtagttagtaacagtatacggaaacaagcttaattctatacctatgaggtgatgattgtgtggaaggctggttcaaggtggacgcttttaattttaggaagcttaataggagcggggtatgcttccggccaagaaatttggcagttttttggcattgatagcggactagccattctattgtttacattgatgttcatgctgtctacctatgtggtgttgaaaatcagttatgaggtacgtgccgatcactttgtgccagtgctagagcggcttgtcggtccatggctggctaaagtgtatgacgttttaattgtcctttatttattcacgacaacgacagtcatgattgccggtggcggggtgacactcgagatgtatcatgtgccattttggattggcatcggtgcattttgtctgttttcatttatgatttttttctgggatgtgaaagggctcttatctgtgaatgctttcattataccaattttggtggcggggctcatctatgcgtttgttttttattatatgaaccatgatcatatgtggcggattgattttgggcagcagtacaattggcctgccagcattgtctttgcttctttgaatatattatctgttgtcgcagtattgtcttcggttgggaaagaaatgaaggggcttggagaggccaaagtggcgagtatattaagcggcctgatttttggggtcatctcgtacgtgtataacgaaatactggttgatatttctgggagcctatcagcagaaggcattcctttgtttacagtattagaaggagcgccgacatcattgtttgtgtttatgaccgttgtcctttgtctagctatttatacgacgacagcggcaggtttatttggtttatccagccggatgctctcttttgtaccattgcctcgctggctggttgtgctggtgatgcttcttttgatggcgcctttaacatctcttgggtttgccgatttgattgctttcttgtatccgatatatagtttgctgaatctttatttgcttgtctgtttaatgctatatccgattttaagtaaaaagatattttcccgctctaaaaattatattgataaaataaaataagcacctctctttgtcagagctgtgcttattttatacgaatagaatcaatggcgtctttgatatcatcatagactggcatttgcttaagacgctgaaggcgttcctctaattctgaaatggcttgtccctttaaatgctgggagatgtgttgtttgacaatggtcgtttggttgatcatgtcttcggttttagacaattgatactccaagtgcacgcgagtgtttgctaattcgtcatgaagccgcattttgagcagccgttttagatcctttcgctgtccttctttgcgtatggcctgaattgcggccatttcttcgggggactgcgtctgtgtttgcggtgccgattgattttcaaatacagacatggagcggcgggcactcacattttgcaagaaacgctgggcgtcactaggaggtttattttgattgatcatgcgatgactcctttcttaatgaatacccatttgcatcgcaaggcgtctatctgccttggcgtagtcatcacccattgtgtacatatgtcttgaaagagtagaaagttcttgttcgtaatctctcagggtgtacaaggcattcagctgtttttcgtgtgaataaaaggaggaatgatgttgttccatcctcacttcctctactagtgcttccacatcactaggacttagtaaatcatagtgaccaaagccgacgagtcctttgagctcctgttttacatgctggacggcgtcttttacactttcatcgatcccatcgattttctcaaatatagtgtgtacttcatgttcaatcacgctttggagatcgtaggatgaatttttcagtaaatgggattttatgataatttcaaggccgctttgtgcatatgcacgtccagaatggatttcttgcaacagcatggctgtaaaacttgtattatgatcaagctgttcatctaaaatacgggcagacccatctgtgtggaatgaatacccatttactttgtaactcccagaaataagagctaaaaaagcatttgtatcaaaggattcgttccattctatattcatagacgcaaaagctgattttaaaaaggtatcaatttctcttttcttgtatttaacgggttcttggacggcgtcttgctgccgtggcggtacagtatacttgacttgaccaaccccatgatcatgacgattgagtaaacctacataatgactaggttgaatatattcagtcaatatccgtgtgtattgaccttgctgcgctttctgctgaatcgcaggcgacagactgctccatatatttgggctatcaaaggtgacggcttttttgacagctggctgttctgttgcaacataagcacaaacagcaccggcaagggcttgtccagtgagatagatacctgcatttggatgctgctgacagacttgctctatgtattcctttcctttaaaaaagacatgatcttgattgccatcaagggacttcctttcaatgggataggcataatccgttttaagcaatgactgtgccgcggtgtgtacatcttgtggcgaggtcaccggcatttgatttggctgcggacagtgaaaagcgacgatgaactcgtctgattgttccggctgcatcgttaaaccatataattgatgatcgaccttgagaaaatcatggacagtgagcgtttgctgacctatttctatcgtatggtgctgctggtaattgtctatgtttccagcatgatcggatatgattttatattctttatcagttaatctatcctttcgattgaccatcgtacctgctccctcacataacatttatgcagatatcataaatcaaaaaatatggaaaaaccacagcgttctaccaataaaaaccttttgacctacagtgtttgtgaaaatattgaaaaaaagcggagtttaagtaactattggtcacaaataaaatgatctaaaagaagggttttttctataaaaaagaataggatgaatgattgaaagaggttctttgttttgtacattgctcttcatcgccgtttttttgtacaatagattcaatgaagtgagcaagagaggtgaaggctgatggcagacaaagcgtttgggttacatgatgtcgttgaaatgaagaaaccccatccatgtggtgtcaatcggtggaaagttattcgattgggcatggatattcgcattaaatgtgaaggctgcgggcacagcgtgatgatcccaagaagagactttgaacgaaaaatgaagaaaattctcgtcaagcatgaggagccaactgcttaagtaggcctcatgcttttttgatgaaattcgtcttttgtatagaagaagcaggtgtgaattcgcgttttaaagcactgatttatcctttttggcaatgtttcttctattgataatgcataacggttagcttgtcttttcatgtaaacctacttataattgctctaggttcatattacgcagtataacgagcacgtttgatatagaggagatgaaagaatggctttaacagctggtattgttggcttacctaacgtcgggaagtcaacgctatttaatgcaattacacaggctggagcggagtctgctaactatccgttttgtaccattgatccaaacgtcggaattgtagaagttccagacgagcgtttgcaaaaactaacagaattggtgcagccgaaaaagacagttccgactgcttttgaattcactgatattgccggtattgtcaaaggggcttctaaaggtgaaggtttaggaaataaattcctttctcacattcgtcaagtagatgcgatctgtcacgtggtgagagcttttgcagatgataacatcacacacgtatcaggtaaggttgaccctgtgtcagatatcgaaaccattaatttagaattaattttggctgatttagaaacagttgaaaagcgtttggctcgtgtgagtaagcttgcaaaacaaaaggataaggaagcggtagctgaatttgatattttgtcgaagctaatggacgcatttgaagctgggaaatcggcaagatctgtagaatttacagatgagcagcagaagcttgtgaaacagcttcatttactcacatctaaaccagttctttatgtagcaaatgtgagtgaggatgaagtagcggatcatgacggtaacgaatatgtgcagcaaatccgtgagtttgcttctggtgaaaatgctgaagtcatcgtcgtttgtgcgaagatcgagtctgaaattgcagagcttgaaggagaagagaagcagatgttccttgaagagcttggcatcaaagagtcaggtctagatcagctgattcaagcatcttattcacttcttggtttagctacttatttcacagcaggtgagcaggaagtacgcgcttggacgtttaaaaaaggaatgaaggcaccggaatgtgctggaatcattcatacggactttgaacgtgggtttattcgtgctgaaacggttgcatatgaagatttacttgctggtggaagcatgtctgctgcaaaagaggctggaaaagtccgtctagaaggtaaagaatatgtagtgaaagatggagacgtcattcatttccgttttaatgtataggttcttgtcataggccaagagatttgttataatatacaattgtgagtaatataatttattgctccttgcccgtttagggccgcttagaccaaaaggaggtgcaatcagatgagaaagtacgaagttatgtacatcatccgcccaacagttgacgatgaggctaaaaaagcagttatcgagcgtttcaataacgtgttaacttctaacggtgcggagatcacaggaacaaaggattggggtaaacgtcgtcttgcatacgaaatcaacgatttccgtgaaggcttctaccaaatcgtaaacgttcaatctgacgctgcagcagttcaagaatttgaccgcttagctaagatcagtgacgatatcattcgccacattgttgttaaagaagaagtataaatcattgaaatatatatttaaaggtggtctttcaatatgctaaaccgtgttgtattggtcggaagactaacaaaagaccctgagcttcgctacacgcctaatggtgcggctgtagccacgtttactctagctgtgaatcgtacgtttacgaatcaatctggagagcgtgaagccgatttcattaactgtgttacttggagaagacaagccgagaacgtggctaatttcttgaaaaaaggaagtcttgccggtgtagacggtcgtttgcagacaagaaactatgaaaatcagcaaggacagcgtgtcttcgtgacagaggttcaagctgaaagtgttcaatttcttgagcctaagagcggcggtgctggttcaggtggatacagcggcggtggcaatagcggaggccagtattatggcggtagccaaaacgatcagaatccattcggaaatgaaccaaatcaaaatccatatggcaatcagagcaaccaacaaaatcgtaatcagggaaatagcttcaatgatgacccatttgcgaatgatggtaaaccgattgacatctccgatgatgatttgccattctaattgatctgaaaaattgactaaaggaaaggtgtgaaaacaaatggcaggtggacgcagaggcggtcgtgcgaaacgtcgtaaggtatgtttctttacttctaacggtatcacgcacatcgattacaaagatgttgatcttcttagaaagtttgtttctgagcgtggtaaaattttacctcgtcgtgtaacaggaactagcgctaagtatcaacgtaaattgacattagcgattaaaaaatcacgtcaaatggcattacttccatacgttactggtgagtaagtcgttgacttaaaagcggagagcctcgagctcttcgctttttttatttgtttcactaagaatctcatccgaattggctagagctgtttttggcgggcatcctaggggaagtatgtaaaagagagagaaagtgacagtttgttctatacaaatacggggtcaatctgtcatattgatagtctagaaaataattgcagtcagggcgtgggaagatgattgaatttaagaaggtatcgatgcaattttctgatgagcgctatgccgttcaatcggttgatttagagattcagaaaggtgaattttttgtatttattggacctagtggaagcgggaaaacgacgacattgaaaatgatcaatcgtctcatttcttctacagaaggtgagatttacataaagggtcaaaaaataaatgattatgatatgtatgagctgcgctgggaaattgggtatgttctgcagcaaattgctctttttcctcatatgaccattgaagaaaatatcgccgtggtgccagagctcaaacagtggagccgaaatgagaccaataagcgggtggatgaattgatgcagatggttgggcttgatcctgctatgtatcgacttcgaaagccatcagagctatctggtggacagcagcagcgtgtcggtgtggcacgtgcacttgcagctgatcctgagattgtcctgatggatgaaccctttagtgcgttagatccactaacgagggagaaattgcaggatgatctgcttgatttgcagcgccgtattcaaaagaccattgtcttcgtgacgcatgatatgcaagaagcgatgaggcttggtgatcgaatttgtatcatgaaggaaggggaagtggtgcagattggtcgtccagaggaattggttcaacacccagtcaatgcttttgttcgggagtttgtttcaggggctgctcgccatgtgggacatcaagcgtttgagctagaggccatggctagaccaatggctcatgagtctcttttaggctatgaagtgatcacagcacatgccacgctggatgaggtcttatcccaattggcaaagcatgaggaattggctgtagaaaaggacggggagcgaattggactagtgaatcgtcaagcggtgattcagtttttagctgattctcctagagagaggggcgagtcacatgaatgattggatcagtgtgttattggaccgaaaagaacaattgggacacgccttacttgagcatattcaaatttcgtttattgctttatttttagccattttgattgccattccattaggtatctatttaacgagggtgccaaagcttgcagagtgggtgattggggtgacggcggttttgcaaacaattccgtcgctcgcgctgcttggcttgttgattcctctcgttgggattggacaagtgcctgccattattgcgcttgtcgtctatgccttactccctattttaagaaatacatatacaggcattcaggaggtcgacccttccctgagagaagcggcgcttgccatgggaatgaatcaccgcaaacggttattaaaggtggagctgcctttggccatgccagtaatcatggcaggtatcagaaccgggatggttctcattgtgggaactgccactcttgccgcactgatcggagctggggggttaggaagtctgattttgctgggaattgatcgaaatgatatgtcgctcattgtcattggggctataccagctgccttactcgcactcttatttgatgtggtgctgcgcacttttgagaaaatctcttttaaaaagactgtgatctttgtgacggtttttgctgtgattgcaggagcagttgtcgcgggcccattactgtttcaacaagaaaagaaagaaatcaccatcggtggaaagttaggatcagagcctgaaatcctgatctcgatgtataagcttttaattgaacaggatacggatattcaagtcaatcttaagcctggtcttggcaagacgtcctttgtttttcaagctttacggtctggtgatattgatatttatcctgagtttaccggtactgcgatttctgagttcctcaaacaaacagcgaaaagcacagataaagaaaaagtgtatgagcaagcgaggcgtggtttggaatcatcctttcagctccgccttcttgagccgatggcttacaacaatacgtatgctttagccgtgcctcagtcgctggctgatcaatatgatgtatccaatatttcagatctaggcaagatcaagaatcgcataaaggctggattcaccttagaattttctgatcgacaggatgggtatctaggtattcaaaagacctatcaattttcctttgacgatgtggtgacgatggaaccgaagcttcggtatcgagcgattcaaaaaggagatatcaatttagtcgatgcgtattcgacagacagtgaattgagggaatacaaattaaaggtgcttgatgatgatcagcatgttttcccgccatatcaaggagcaccgctgctaagacaggagacattaactgagttccctgagatcaagacctctctcaataagcttggtggtcaaatcacagatgatgagatgagagaaatgaattatgaagtaaatgtgagaggtaaggatgcatttcaggttgcgaaagcctatttaaaaaagaaaaaattactgcaataatcaaggaagagcaggtctgttatgtaaaaagcagacctgcttttttaaaagggaaaacaaaaaccgttgacatttatttaaaaacatcatatccttaattcgagataaatatatttttttgatttaatatctcgaattcgagataatataaagacgtcagtaaagacataatgaatagaggcttgtacttcatgatgaggaggtcattagaattgaagaaaacagaaggaattcaccatatcacagcaattgtagggcatcctcaggagaacgttgatttttatgcaggtattttaggacttcgtctcgtgaagaagaccgttaattttgatgatccaggtacgtaccatttatattttggaaatgaaggaggatctccggggacgattatcacgtttttcccttggccaggtgctcaaaagggacaaattggcgctggccaagtgggcgtgacgacatatgttgtaccgccaggcgctttctctttctggaaggaacgtcttgagcagtttgatattacttatgaaatggttgaacgctttgatgaagcctttctctcatttgaagatccacacggcttgttgattgagctagtagaacgagcggagggaaaacaaaatgagtggacatttaacggggtcacaccagatgtcgcgataaaaggatttggcggagctgttttgttaacatcacagccggagcaaacgatgcagctgctagaacaaacaatgggttttgaacgagttggagcagaagaggactatgtgagattccgttcgtttggtgagataggcaatgtgattgatgtgaacaagacacctgttccacgcggacgtatgggtgttggggttgtgcatcatattgcatggagagcgacagatgatcaggatcaattagattggcaaagacatattgcgcaaagcgggtatcaagtgacacctgtgcaagatcgaaattacttcaatgctatttattttagagagcttggcggcatattatttgaaattgcgactgatcctccagggtttgcacacgatgaatcagtggaaacaatgggtgaagcattgaaactgccaccgcaatatgaggcgcagcgcagtcagattgaacaaattgtgctgccaatagaagtgagagagattaaagggaaaggagattcatgatgaagcatctttttcgaaaaggaaagaatgaacaaagacctgttttgttattactgcatggtactggcgggacggaagaagatttattgccgcttgccgatttagtagatgctgacgcatccgttcttagtgtgagaggaaatgtgttggaaaacggtatgccgcgctttttcaggcgtttggcagagggtgtatttgatgagcaggatttaattgagcgtacagaggaactatatacatttatcggagaagcagcagatgaatatgggttcgatcgtcacaatgtggtggctatcggatattctaatggggcaaacattgctggaagtcttttattccattacgaggatgcgttaaaaggagctatcctgcatcatccaatggtcccaagacgcggggtttcattgccttcattagcggggaaacaagtctttatcgcagctggtgaaaatgacccaatgtgccgtccagaggaatcacaggagctcgagcaattgctgcaaggcgcaggcgcttcagttacgcttcattgggaaaatcgcggacatcagctaacaagagaagaagtcgatgctgcggcattatggtatcgtcgtcaattttaatgaaggtggggaatacaggtgggatttttacagaagctttttgggcaaaccaaacaaaaggagatggaacaaatggaaaacgtaaaattagcgattatttattatagttcaacaggtacaaactatcagatggcaaaatgggctgaagctggagcgaaagaagctggcgcagaagtgaaggtattaaaggttgctgaattggcaccagaagcagttgtagcatcaaatccagcatggaaagcacatttagacgaaacaaaggatgttccagaggttcaattaagtgatttagagtgggcagatgctatcatctttagcatgccaacacgttttggtaacctaccggctcaaatgaagcaattcttagacacaactggcggcttatggttccaagggaaattagcaaacaaagcagtgagtgcgatgacctctgcacaaaacccaaatggcgggcaggaacagaccattcttagcctttacacaacgatgttccactggggagcgattattgccgctcctggatacacagatgactcgttatacggtgcagggggcaacccttatggcgtgagtgtcactgttgaccaaaacggaaagatccaagaggatgcagaagctgctgcaaaacatcaagcaaaacgtacagtcaatgtagcagaatggatcaaaaagggtcaaaacgcttaatcgatgaatacaaaaagaatgcagcctaggcgctgcattcttttttatttaataaggatctgatggtgtgctgttgttaatcgcttcgtccacggcttgtgcggcgcctgtagagcctataggtccgcttggctgttcttgtttgaaggcttttaagccatcagcgacacgctttccgtaatcagggtcagcctttgtaaagttttcgatcatttgctcttgaatgtctttttgacaggtcgcaagggtgttgactaagttcttaatcagttcctcacgttcccaatcattgaagcggcgatacgtttctccggcttggccaaagttgttcgggcggtcaatggcttctcgtttgacgtcaccctctacaaaaggcgtatgatcttttccatcctgcttggcttcttttaatccgccgaggatcgatggttcataattcacatgagggttttgctctttgccttgatcgacatggtattccatttgcccatctctttgattcgtggccacatgctttttcggtgcattgatcggcagctgtaaatagtttggccccacacgatatcgctgcgtgtcagaataggagaaggtgcgcccttgaagcaacttatcatctgagaaatccaaaccgtctacgagaacgccagtcccaaaggcgacctgctcgacttctgcgaaataattttctggatttttgtttaacaccattcgtccaatcggtttccatggatagtcattcttgtaccaaagctttgtcggatcaagcgggtcaaagtcaaggtgaggatgggcatcatcttccatgatctgtgcatatacctcccattcaggatgatctccttgctcaatggcttcatacaaatcctgtgtggcatgattaaagttttctccttgaatcgcttgagcttgttcttgcgtcaggttgcgaatgccttgcttcggttcaaagtgatatttgaccagcactgcttttccttcatggttcacccatttgtaggcatggacacctgagccttgcatgtgccgataggttgctgggatgccccatggtgaaaagagaaatgtcaccatatgcgtcgcttcaggtgattgcgagacgaagtcaaaaatacgctcgccgtcttgacggttggtgacaggatcaggcttaaaggcatgaaccaaatcagggaatttcaaagcatctcggataaagaaaattttgaggttgttccccacgagatcccagttgccttcttctgtataaaatttaatcgcaaatcctctagggtcacgcaatgtttctggtgaatgaccgccgtgaatcacagaagaaaaacgaacgaaaacaggtgtcttttttcctttttcctgaaataattttgcccttgtataagtggaaatgggttcgtcaccgaatgtgccataggcttcaaaataaccgtgagctccggccccgcgcgcatggacgacacgttcaggaatgcgttcacgatcaaaatgactaattttctctaggaaatcgtagttttcaagcgtagttggtcctctattcccaacggttctcatattttgattgtctgttacgggatgaccttgccgattggttaaagtgtcttctgactctgaagatggtttagggtgttgttcttctttcaattaaatccctccttcaatatctccctaacaatatggtcatcatgctccctatttcatacaaggattgatataatgattgaaaactttcacgaggagcgaacctgatgattcgattacactgccttcacgcccatccgtccaatcagtcatatatagaagatgtttttggcgataccgatattgcgctttatcacacggtcgattcatcatttatagaacgcgctacacaagatcccacttttgatcaacacaagcagcaagcctatgtcatcaacaaactgatgcaagaagatgaagccgatctcattctgctcacgtgtacacaatacattgccgctttgggtaatcagcagcatctttttaaacaaccgattgttccgatcgatgaaccgttgtttgagctgatttgtcagggaaaagggcctcttcaacttgtgttttcaaacccggatacagtggaagggacgatgaagcggcttaaatcatatgcaaaagagcacggcaaacagattgatgcagaagttatggtgatggaggatgtctttcacctttgcctaaatggtgatatgcaggcttatgaggagcaaatcaaaaagcacctcagaagatgtatgaaaaaaagcggagatatttgcgtgatgcagctatcgatggttcatgcggcacagcagatggaagaggagacaggcgttccgatcattcatccgctttctccacttaaacagtttgtccatcaaacaatatctgctttgaaagagtgaacctgtctggttcgctctttttgtatagaaacggaaatgggatgacatgttaaaaaaataaccgagcgcaaactattttcaaaaggcgcgcgtctatccattgtaagaaataaccgatgcgcatttaagataaaggagctctttgtaaaatgaagaaacgaaagattgaggatcaatttgctgattacgtaatggagcataaacacagtttttatcgattgtcctatagttatgtcaaaaacccagaggatgcgatggatgtcgttcaagaggcgattcataaagcactcaaatctgttcaccgattagaggatgcgaccaagatgcatagctggttttataaaatcgtggtgaacgctgccctagactttttacgaaagaagaagcgggtgcaagtgacagatgatgacacactcgaattcttgtcaaagggtgagtcagatgtctatgaggatcaagatgtcagacgagccatagaggatttgcctgagatgtaccgggttatcatcattttgagattctttgaagatttaaaattagaggacatcgcccatattctcgaagaaaacgaaaacaccatcaaaacaagattatataaggcgttgcggcttttaaaagtagaattatcgcaggaggaaatataaatggataagcatttggaacagttaaaagaggaatatttagaaatccctattccaccggaatatgatgctatggttgaacgaacattgaaacgaaaaaacaaaaaacctcattttcagcaatggaccatcggacttgttgctgcggctgctctatttgtcacgacagttaatgtcagtccacaggcggcaagagccatttcagaggtgcctgtcattggcgagctggtgaaagtcgtgacattcacagaatttaaaaagagtgatcaaggaacgaatattgaccttaaaacaccacacgtttcagggcttggggacggaaaattacaagacagcctgaatcaaaaatatttagctgaaaacaaaaaactgtatcaagattttgaaaaggaaacaaaggggtataaaaatggtcatttaagtgtagagagcggatatgaagtgagaacaaacaatgaccaaattctctcgttaggtcgatacaaggtgacgactcaagcttctgcggcagaggaaatgacatatgatacggtggataagaaaaaccatgtactcattacattaccaagcttgtttaaagatgaccggtatatagatgtcattagtgaaaatattaaagatcaaatgaagaaacagatgaaagaggattcaaataagatttactggattggcaaggatgatatggacccatttaagaagattcagccggatcaaagcttctatatcaattcaaaaggcaaactggtgatttcctttaatgaatatgatgtggcacctggttacatgggtgtagttgaattcacgattccaacaagtgtgctaaaggatattcttgtcagcgatatgtacattcattaaaagaagaaaaaagactgctgaacatgtcagcagtcttgttgtgttgattaagaaagtgcctctgtcagtgcaggtaccacttgtttctttcttgatacaacaccttttagtaaagcggtgttgttttcaagtgtgacgttaaatgctttttctacttttgcagcttctgcaccgagtgcaagagcaagggagtcattttctaggatgtctgtgatcacaagaacgaatagatcaagacccttcgctgcgatgacttcattgattttcgcttcaatgtcagcctgtcttgctgttacttccgcgatatctactgtattaacttgcgcaatttccactttgctattgcctagtgcgaattcttttgcatcaattgtaattaattcttgaaccgttttttggcttaggtcagcgccagctttcagcatgtctaggccgtaaacttctggatctacccctgcaattttagctagctcatgcgcagcatcaatgtcttgctgtgtgcatgttggggatttgaatagcaaggaatcagaaatgattgcagataaaagcaaaccagcgatttctttttcaatcttcacttggttctctttgtacattttgtttaagattgttgctgtacagccaacaggctcagcgcgatagtatagaggttcacttgtttcaaagttggcaatacggtgatggtcaatgacctcagtcacttgtacttgatcaatatcgcttacactttgttggaattcgttatgatcgacaagaatgacttgctttgtttcgtttgcagctgtttcaatgaaacgaggtgcttcttgtttaaagaaatctaatgcgtattgtgtttctccattgatttctccaagtctgaccgcttctgcctgaacgccgattttgtttttcagatcagcgtaagcgatagcagagcaaatcgtgtctgtgtcagggtttttgtgtccgaatacgagtgtttttcccatgtgaattctccttcttacatttattgatgatgtttctattctaacagcttttgaccttgaattcagggtttatagctaagaataatctaaaaaattgtaacatgctgattgaaaagttgcatgtacgaatctatattggtgttccacgtgaaacgctcctaagatagcctgcattttacttgcgatttgccgctatggtaaaataaaggttggggtaagacatggtgtagcttacatcgtacgtatacatagaaggacacattgagcaagatatagaaaaaggattggatagaggtgaaggtgtgaaacaaacaaaagcgttagtagagggcgctatcatgatcagtattttttctgtcatgatgctgttttatttgtatgtgccgctattatccattattttctttctagctgctccgataccgattatcctctatacaatcaggcacggcttgaaaaaaggaattgctgctggcgctattgggatagtgatcagctttttaattgggtctcttgctggactcatgagtgcgccaattctgattgctgccggattaggcatgggtgttttctacagcagaaggcagcctgggaatgccatcattacaggtgcgctgatctatttattcagttttcttatctcctttgttgtcagtgttcagctttttcaagtcgatatcatgggtatcgcgaaagagtcgattgaacaaatgattccgatgttagagagtgtcttaaagcaatccggcgcttctgagcagaacattgcgaagcagctgaagcagttcagagagatgcaggatgctgcattgagtgctttgcctgtagcgctgttaattggtgtcacattgctggcgttcgtgaatcactggttcgtgcagcctctgatcaaacggtttgtcaaagacatgccggtcttgaagaaatttaaggatatgcggctgccaaaaagcatggtatggtattatttactcacactgcttttgatgctgattcagacggaaaaaggcagctttttatggcttgttcaaacgagtgcttttcaaattttatttatactggtgcttattcagggattttcttttatcttctattattgccacgaaaaaagcatctcaaaagcggtgcccattttcgctatcgtgttaggggttctctatccgccagtcggtgtgattgtgcgtattatagggattgctgacataggctttgatttaagagagaaagtaaaaaacaaataattcactctgaatgttgaggagttgatatcagtgccaagcttctatagaaaacctgtcatcaagtatccgatcatcgctttgattgtccttgcggtggtcacagtcctcctcaacctttattataattggatcataggagcggttggtcttttcgttcttgcaggtgtgctctacttcttaaagtgggcagatacgcaagtgcaaaaagagattgattcatatatttcaacattatcctatcgagtcaaaaaggttggagaagaagcattaatggaaatgccaattggtattatgctgtttaatgaccagtattatatcgaatggacaaatccatttctcgcttcgtgctttcatgaaagcacgcttgtcggcagatctttgtatgatacattcgagtccgttgtgcctcttattaaacaagaggtcgagacagaaaatgtgacgctgaatgatcggaaattcaaagtcattattaaacggtcagagcgccttttatatttctttgatgtcacggaacaggtgcagattgaaagacagtacgaaaatgaacgaacggtgttatcttatatctttttagacaattacgatgatgtcacgcagggtcttgatgatcaggtgcgcagcaccattaatagtgaagtgacgtcgctgttaaacaattgggcacaagaatatggcattttcctgaagcgaatttcgtctgaacgatttatggcggttctaaatgagagcatcttagcagagctggaagcgtcgaagttctccattttagacgaggtccgtgagaaaacaggggcgcatagtgcgacgcttactctgagtatcgggattggagcgtccgttccttctttaaaagagcttggggcacttgcgcagtcgagtcttgatcttgccctcggacgaggcggggatcaggtagccattaagcagccaaatggaaaagtgaaattctacggcgggaaaacgaatccaatggagaaacggacacgtgtacgcgcacgagtcatttctcatgctttaaaagaaattgtatctgaaagcggaaatgtcatgatcatggggcataagttcccagacatggactcgatcggtgcatcaattggaattttaaaggtcgcccaggccaatgggaaagaaggctatattgtcattgatgccaaccagattggtgacagtgttcaacgcttgattagtgagattaagaattatgaagatctttggtcacgttttatcaccccagaggaagccatggagcttgcagaggatgatacattgcttgtggtcgtggatacacataaaccgtctctcgtcatggaagaacgactgctcaataagattgaaaatgtcgtggtcattgaccatcatagacgcggcgaagagtttatccgtgatccattacttgtctatatggagccgtatgcttcatccacagcagagcttgtgacagagcttttagagtatcagccgaagaaattgcgtattaacatgattgaagctactgcgcttctcgcagggatcatcgtggatacgaagagtttctcgctgagaacgggatcaagaacgtttgatgcagcatcctatcttcgtgcgaagggggcagatcctgtccttgtgcaaaaattcctaaaagagacagttgatcattacatcaaacgggcaaaactcattcaacatacagatttgtatcaaaatcaggtggcgattgcttcattgccgtcagacagctcggagtattatgatcaaattacgattgcccagacggctgattctctgttgtcaatgagtgaggtagaagcgtcatttgctgtcgctagacgagatgacaacacggtgtgcattagtgcgagatcattaggagatatcaacgtccaaattatcatggaagcgttagatggcggcggtcatttgactaacgctgccacccaaatgtatggtataaccattgaagaagcggtagagcagttaaaagctgccattgatgaatatttcgaaggaggggttcaaagatgaaagtcatctttctaaaagacgtaaaaggcaaagggaaaaaaggcgaagtcaagaatgtagctgacggatacgctcacaactttctcatcaaacaagggttagcggttgaagcaaatccaacgaacctaagcgcattggaagggcagaaaaacaaagagaaaaagaatgccatccaagagcttgaacaagcgaagcaactaaaagagacacttgaggcgttaacagtggagctcactgcaaaatcaggtgaaggcggtcgtctgtttggatcgattacaagcaaacaaatcgctgataaattacaaaaagatcatcaaatcaaactcgataagcgcaaaatcgagctgaatgacgccatccgtgcattaggttacacaaatgtaccggtgaagcttcatccagaggtacaagcaacgttaaaggttcatgtgacagaacaagcataaagcagaaaagaacccgtctcacgaggaggcgggttcttattttatgatggatctgaaatatagacgcttcgtccggctcgcataccggataaaaacatgaaaaataggatgatgataaagatgataatggatggcgtccatgtatgtgtgagatcaaaaaggataccgatcatgaacggaccaacggcggctaataaataaccgagagactgcgccattccggaaagggcagcggcttgctccatattggtcgttcgtaacccgataaatgtgagcgccagactgatgctggcaccttgtccaataccgatcaataaaacagagatcacgagaataggcgacgatcctccgagaagaagtccgatcatgccgagtaaatacacaaggacaagtccgaagacaagcggtctttgtgtttttaatttttctgcaaaaacaggcgttaaaaaggtggatggcagtccagcaaactgcataatggacagcatccagccggctgtcgacaggttcattccatgtgatgttaaaatatcgggaaaccaggcgatgctgctatagaaaaggaatgactgcaaccccataaaaaaggtcacctgccatgcgacacgtgaacgccatattggctgctctgtgagcgaaatgcttttgacggccgctgtgttctgatgaagaagctgtggcgcccagaccatcatcgcgagaagagcaaggccagcccatacgaggaatgatgtattccagccgccaggcatcgtatgactgagtggaacactgacacctgatgcaagtgccgcaaagacggacatcgaggtcgtatacacgctcgtcatcaatccagcatgtgcaggaaatttatgcttcacgagccccggtaagagcacattacatattgcaatcccgacaccgacaagcgcggttcccatcattaagaagatgatcgtgccaaacgagcgaatcacaatcccaaataaaaggacagcaagcccaagccaaagggttcgttcattgccaagacgttttccgattttaggtgcaattggagaaagcaatgcgaatgagagcagtggtaatgttgtgagaaaacccgcaagtccatttgaaagctgtaaatcggaacgaatggcgccgatgagaggccccacggacgtaatggcaggccgcagattaaatgcaatgagtaaaatcccagcaatcagcaggatggtttgtcctttactgcgaggatgtaatgttgattgttctagatgttgttccatgaatgtaaactcctttatttctttaagaagaacgatctttcttctgttcaagttctgctagtttagcgattaagatatgctgcggcatgtgcatgatttgttcaatgggtacattgagtgatgccgcaagtttttgtgctgtatcggctgagatttgtaaaggtctcatgagcaaatccctcctctttcaatctatacgttccaatataacatatcagctttgtaccatgctgataaaaaattagagttctcttttataaaaccactttatggccgataagaaatttttttgaaattgtttcagatgatggccctccccttgttcgatgtgatattgcagctgccaatcctgcatccctttctgtaataaaaggtcatgtagttgtttgttgaataaaggcatgtgctgttgagcagatgttttgcctttaccttcttcactgcctacagataaatagacaaggtgctccacacactgaatgctttgttgtttagcaaacggtagaaaatcttgataccaaaatgacccagagatagatgcgatgtttttaaaaagggcagggtgcatcaatagggtataaatagcaaatagtccacctaatgaagcacctacgtgactatgttgatgacaggtctgcttgactggatattctcttttgatatatgggagcaagtcatttgctaaaaatgacatatacgtctgtgcctcgccattaaagtcaggaaactcagaacgcagtgatgacgccttccatggtgtatattcatcaagtcgattgaaggggtgtatgccgacaatgatgattggcgagatggtattggcttcgatcattctttcgatctctagcaggtgtgttctaaacaaagaagagccatcttgtacaaagacagctggaacatcaatagaggtgtcctgtggaaggtaaatatcaagctgacgcccattaaactcgtcatatagaaacgttccgttcatgtgtattctctcctcaaggttttcaactacgctgaaaagaagacaaagagctaaaaataaagatcattttagccctttgtcaacaatctgatcgcgcaaattggcgcttctttttttagttgtttttctctaaccatttgacagctttatcaaggaaggttgttttgcttagtgctgttcctccttgaagcataggatcaacgacatttgcattgatgtgcccatttttcacagcttttaggcttgtccaaattttattttgctctaagtccttcaatgcgtttggattcgatgagttttccgctttagagaactgaacaaaaatatagtcaggatttagctcgcccaggcgctccatcgaaatcatcgcttgtgctttggcttttttgatatcacttggtgctgaaaatcctaagtccccatataaggttgagttgaagtatacgtcttcaggatacacgtacaggtcgccctgtctaatgcgtaaaatgacagctgttttgttgttgcttttgtctttcagggtttctttcgcttgtttgagatctttctgataatcagaaatgatgtttttggcttcttcactctttccagtcagtgtaccgagcaataaaagattgctttcccagtcagaagagacatgggatactgggatcgtcgtttggactttatccagttttttaattgttgcaggcgggaactttgttgatccgagtatcacgtctggttttagttttaagattttctctaggtttggttctgttttttcaccgatgccttctgttttcgctgtgatgtctttaaataattcagggaatgtgccgcctacggtagaagcaccaataggttggataccaagtaattttgcatcttccattgattctaggcttccagcaatgacgattcgtttcactggtgttttgagcttgtacgtttgatctaagtaattgatttttgtttctgttgcttcagctgacttgcttttggctgtgtttgaagcaggtttattttctgtagcaccacaggctgctgtggtgatcgtcatgatacaaagggtaagcaatgctaaccattttttcatttgttttctcctttaactgataattgttctcaattaaagattgtattaggctttcgtccttttatccatagacaattctctatcaaatgatggactttttacggaaaaaaagataaaaggtcctgaatgactcgttgatgactggctgctgtgtattcacgccaagggtcagaagcgagtggatagactgcttgttgactcacagccttgagattttgccaagcctcctgttgctttaacttttgataaaatgcaatggtttttggctctttatgcaagaagagaaagatggcatctgggtctagctgttgtatggagcgaatgctgatttttttttctattagctgaccatcattctgaaaagctggcagaagaccaatgtcatgaaaaatcacttctgacatggtgcgatttacagacaagtagagctgatcttgaaagatacgaagaggcaggacggtttttggtggatgatcaacaaggcatgcctttttcgcttgaatgacgatttcctcgtaatgaagcaaccattcttctgcttccttcgcttcgttcaggaacatagctgtttgtctgaattgagcgcgccaattcaattgtgtgaatggaacaaagtgaacaggacagatggttttcaacacttgtttttcttcctctgtcacatgatcattggcaatgatcagctcaggttttgtttcctttaattgctgtaaattggcttcagcgtgctcgttgatacgatgtgcactcaggtgaatcggaatttcttctgcatgatgctcaaaatcatgtgctgtccatttaggatgaagaggggcagcatatgggatgatatgaattggtgtgagctgaccgagtatggaatgaccataggctgcaattttccgctgacggcttttcatataagcagaaggggtcatgccagtttttttcttaaagatgcggctaaagtaatagggatcttgatagccgatttccagtgcaatgtctttgagctttgcattgctttttgccattaactgtttggctctagccatccttttcttggtgatataatcagtgacactcacatcaaaatgctttttaaataggtcactgtaatgattggcgctgatgccagccatatgagatagacttgtaaggctgaggggttcttcggaatgttgatcaatatattgttttgttttgaaaagggcatgtgccgtgtcacaaatatcttctttatgcagtgtgaaaagctgcataatgagctgttgaaaaagagtttggcttctaaaaaagctaatggattcaggtcttttccattcctctgtcatttcaggcagtaaagaatgaatttgttcaatcgagctaatatcgataaattgccatacattcagtaaagaacgggcatgttcagttgatacttctcctatgttttgatcttgcagtgtgtagagctgaaagcgaaacagatagagctcgtgttttcgataaggctctgttttcaacataaatgtttccccaggcatgatcgtatagagtgtcagatttttcaatcgccatttttgatcgttcaatgtgagcaaaccgctgccgcttatgctgaagaggaggcagaatgtatctgatagctgttgctccgtatgcggaagctctgcattatttattttttcagtatatgttaatcgatagatgaattgttcggcatttgccattgtacgtaattgattgttatttcccataaaaccacctgatctcttaatgattgataaacattctcaattaaattgtagcagaaagggctggaaagatggtgatgtttattctgtcaaaaaagcaccctgagtgagatcagggtgcgatgatttattccgtttttccatgtgctagggcaggttcttttgttaagcttaaaggccgtaagtcctgccagtgtgtctggatataatcgatgcaggcatttctagtgtcttcaccaaagaccttttcccatccatctggcactggtgcaaatgatggccaaagtgaatgctgtccttgttcattgacaagcacaagaaagacaccgtcttcacgatcaaagggatttgtcatttgtcatctctcctttattcttagtgcttttgtttgacccgatgcagtgtgttgtctaagatgacaccaatttctgctaggggtttaggctggcacatgtctttgtgccggcaatgaatgtcgtgctgttcaatttttccgttgatataaggtgcccatgcttcgggatcaattggtgtaaaccaatctgggataatggtagatctaaagaataatatatctccatgataagtttttggctgatattctccgagcaatcgaactgaattgacataggtttcttttagatttctaatggcatcttcacttaagcttgctagtgcactgccatcttttttcaagatgtcgacggcacttttcattgtgagcggttcatctgttaaggtatctggatcataaccgccgagcgcaagaagagcgattagtgcttcttcttcatcaggtgcttctttaatcggtaagaaatggttcggataggcatccagcatcgcaacgagtgagatttcttcaccttgctgctggagctgtgtagccattgcctgtacaacgtttccgcctagtgaccagccaagaagatgataagggccttttggctgaatcgtttggatgtgcttgatataatccgcagccatatcatctagtgtgcgcgggtagtcatcttttcttgcgattcctcgtgcctgtaatccataaatagggatgtctttctctaatgtattcaagagacctgcatagcaccagctaagaccacctgctgggtgaacacagaagagaggatatctttctccatttgttcgtagtggcagcaagatttctagtgcgttttcatcgcttcctgtttctagtttctctgccaaacttgcaacatttggtgcttcaaacaacgttccgatgcttagtttgacaccaagtgcatcacgaatgcggctgattaaacgaaccgcaagtaaggaatgcccgccaatgtcaaaaaagcgatcgtcaatgctgatttttggcaaatcaagcacctcttcaaagagatgacataggatttcctccttcggatttcttgggccgcggccatccgtttgctttatatgcaattgaggtgccggcagtgatttttgatcaagcttcccgtttgctgtaagtggcatggtatcaatctgtacatatgccgcaggcaccatgtaatcaggaagactggctgcggcaaaatgacgaagggtctctgtatcgaaacagtcttcttcagttgttacgatatatgcgactaagcgtttgtcaccaggctgatcctctcgcataatgacggcaacttgtgcaactgcatcgtggcgtgccagaacggcttcgatttctccaagttcaatcctaaacccgcgtattttaatttggtgatcagctctgccaatgtaatcaagtgccccttcttctgtccagcgtgcgaggtcacctgtacgatacatccttgtgccaggtgctccataagggtcggcagggaatcgatctgaggtcaggtcaggcctgcttagataacctctggccaagccagctccagctacatacatttcacctgtcgtcccagggggaacaggttgtaggtattcatctagtacgtaaacgtgtagatcaggaatcggttcgcctattaagctactggatttctttgcgatcatgtctcgattgagtatattgtacgtaacgtgtacggtggtttctgtaatgccgtacatgttaattagctttggcttacagtctgggtgacggctgtaccaatcttctaatctgctaagctctaatgcttcaccgccaaagatgacatagcggagtgataatgcttgaccaagtgtctgttgttccttgtctatctgcatgagctgatagaaggcagaaggtgtttgattaagcacagtcacaccttcctcgactagaagctgcagcatctcttctggagagcgagagatggtatgaggtacaatgacaagtcgacctccatataaaagtggtccccatatttcccatactgaaaaatcaaaggcatacgaatgaaacattgtccaaacatcttcttcatcaaaatggaaccaatgtgcagtagatgtcagaagacggatgacattttggtgtgggatgaccactccttttggtttccctgtagaaccggatgtataaataatataggccggatgcagagaagatagtggctcaattctgtctatatcagccggattgtgatttggcgtagtcagcaattgatcgctcgtttctttttcgtctaacaaaatcaaatcgcaatcagcagggagatgcactgcatctgcttttgttgtgatgctgcaaacgggtttggcatcttgtatcatgtatgccagcctgtctgctggatagtcaggatcaagcggaacataggctgcgcctgctttatgaacggctaataagcttacgagcatatcgattgatctaggcagggcaagtgcaacgaactgttctggtccaacgcctctttctattaataaatgagcaagtcgattggctttgttgtttaactcttcataggtaagctgttgattgccatccgttacagccactcgatcagggtattgctgcgccgttttttcaaataaggctgggagactaggtgcttggtctaactgagcgaatgtctttttgtcagggagaaatgtttgtcgttctttatccgacaaaatgttcacttgaccaatcggcaggtgtgggcgctcagctacttctgttaaaaagcgcttcattctgtcagcgattgctcgaatggtgctttgtttaaatacatctgtactgaattcaaacaaacctgttaatcctgctgctgatccagtttcagttctttgttctgtcaattcgatggtcagatcaaatttagctgaccctactggtttcacatagagatctgagtcaagttgtgtcagcttcatttccgccttcggtgtattttggaaggcaagcatgacctggaacaatggattgcgtgatctggatcgggttggatttaggatttcgactagccgttcaaatggcagatcctgatgctcataggctgctaagtcaacgtctcgaactcgcttcaatagctcactaaaggttggattaccagctgtatttgtacgtaatactagtgtgttcacaaacaatcccacaatgtcgtcaagtgcatcgtcattccgtccagcaattggactgccaattgggatatctgtccccgccccaaggcgtgtcagtaatgctgcaagtgatgcttgaagcaccatgaacaaactcacttgatgctgctttgcaagctcaaggagcagctggtgtaaagcgggctcaatcgtaaagtctatcgtagcaccgttgaagcttccttcctgtggacgcgggaagtcatagggaagctccagttcttctggcaggtcctgtaaggcacctgtccaatagcttagttgcttggcaaatagactatccgtctcttcttcactgcccaacagcttctgttgccaaatagcatagtcagcatattgaacaggttcggctggcaaggagagtgatttcccttgtatacgtgcttcgtaagcagcagctaagtctcgtgtcaatggtgcaagtgaccagccgtcaccagcgatgtgatgcagcaatagaagcagtacggatcgatttgcatcaagcatgaataaatctgctcgcagtgcgggttcttcttcaatcttaaagctatagcgaatggcttcgtttaactgattctcaatttgttgatcgcttgaagctgtgacatggagttcaggctgaacactttttggatgtaaaatgacctgtcttggcatgccgttcttatttggaaaaatggttctaagggtttcatgtttttcagtgatatctgccaatgcaccaattagagctttttgatctagtgtacctgtcagctgaatgacaagtgggatattgtaagttggacttggcccttcaaggcaatgaaggaaccagagccgtttttgggcaaaggataacggaatctcatctggcttgttttctacctgaagcggcggccgaatgtccttcgctttgtcaatgtgctgcgcaagctcagcaactcgaggtgattcaaaaatggtactcatgcttaggtctgcaccaagtgtatcgcgtatacgtctaagcagacgagcggcgagtaaggaatgtccgcctaagtcaaagaaactatcatctatgccaatttgagataggccaagggtttctgcaaataaactacataacatgtcttcttggggcgttctaggtgtacggtcagaactaactaaagacatatttggtgctggtaatgctttgcgatcgattttgccgtttggtgtaagtggaaggtctggcaaaacgacaacagcagaaggcaccatgtaatcaggaagtgatgcagccacaaactgcctgagctctgaagggtgcagagaagtgccatctgtcagcacaacatacgcacaaagcagctgttgtccaggttgatcctcacgaacgataacagatgtatgctttatggattggtgttgcataatcacggtttcgatttcacctagttcaatacggaagccgcggattttaatttgatgatcggcacggctgatataatcaattgaaccatcctcacgccatctggctaaatcaccagtacgatacattctcgtgccttttgtaccgaatggatcagccacaaaacgttcagccgttaaatcatatcgtccaagatatcctctggatactccttcacctgcaatataaagttcaccgattgatcctgctgggacagggtttagcccttcatctaaaatgtaaatactcgtattccaaatgggtttgccaattggcggcccgctattctcttgatgtgctgtgacattttccatcgtagaccagatcgtcgtttctgtaggtccgtacaaattggtaatgtcgcattgaagagattgcaatgtgtgcaaaagggaggcagggagtgcttctcctccaacaagaacacgcatacctgttatcacgtcagggtattcatctgccaatacatgccacaacgttggtgttgcctgcatgattgtgacatgatgagaacgaatcatgtctgaaagctttgctggctcttgtatgatttctttttttgccaataaaagagcagccccatgtaagagtgggaggaacatttctagcccggaaatatcaaaggcaatggtcgttaccgctaaaagctgatctccttgatctaataaaaatgaatcttgcatggacaatataaagttgatcacatttcgttttgttacaacaacaccctttggtttgcctgtcgatcctgacgtgtagaggatgtaagccgggtgatgtgaagagccttcgttccaagtcggattgagatgcggactccctacgatctcctgataaacagttgaatcatcgagttgaacgatgtgtggatggtccaaacggtctgcggtctctttgactgtgagcaagcacgctggtttggcatcatttagcatataggcgacacgatcgctagggtaatcagggtctaatggcagatatgcggctcctgttttgacgacggccaacagacttacgaccatatcgatggatcgaggcagagcaattgcgacaaattgttctggtccgatgccatgccttttcaaataatgagctaattgatttacccgttgatttaactcttcgtaggtcaaagtggttccttcaaactgtattgcttttgcttgtggtgttttgctgacttgtttttcaaatagttcccgtaaagattcttttggtaattctcgttttgtatcattccagtgcttgaggatgttctctttttctttagacaaaagaaggttgaattgactgattgtctgatcttgttctagtccagttatttcctccagcaattgaagaaaacgatgctgatgagcgtcaactgcttgctctttgtaaacggcagggtttgcatcaaagtcgatttgaaatccgttcccatccgcgcggtcgtatatgttgatcgataaatcatctacgggtcctgctgaaagattatgtgcttgaccaatgctctgatcgaacatgagatcataatcaaatggcatgatattgatctgtgggccgaataatcgttgatttcttccgatgagtttaaagtctctccgcatgtcttcgtgacgatatctttgatgaggccgaatggctttcagttcatcagatacttggcgaacaagtgctgagagcgtcatttctggtttgcatgttaaacgaagcggtactaggttcatgaccattccgggtgtttgcaaggcgcaagatccaaggcgcatcataacaggcaatcctaaaacaatatcgtgtgcaccagtcatacgatgcatatatagagcggatgcggcaagaatcatttcatgccaggtacaaccgaaagcttgagcaatttttttcattttgcttaccttttcagcatcatagctagcggtttttcggataaaatcatctgaagttcttggggcaagctcagcaaggctcacaatttcaggttgatcagcaaagcgatttttccaaaacgctcgatcctcttcataccgattggactgttgatagatgatctcctcttggactacgtcatgtaaggctccaaatgtttgaggaggcacaggtgtccctttcgatagggctgaatagacctcagcaacacggcgtgcaatgagcgaaaaggcgaatccatcaatggcaatgtgatgaatgcgctgataccagataaatcggtcgtcagcaagttgaaaaagtacttcacggaataatacatctttctctaaagagactgatgttgaaagatctgcattcatccatgctttagccgcatcaagcggctgtttttcatattgtaaattgatatattgaaatggaatctctttcttagatgtaaaccattgctttggaccgtcagtatcctcaacgaagcgcatatacaaggaatctgcttctaagacagtctttctaatggctgcttcaaagtgtatggggtcaatataacctttaatatctatatactcagctgtattgaaaatgggattagatggatcaagctgctgcgcataccatatgcctgattgggcaccggttagtgggaatgaatcgactgactggatcgacaagggtctatacctcctttacatgtaatcgatatttgggatagatggctgtttttctgggaaaagaagagttcgccaatgagtgagcgttggatttgctgcaagctcaacgaaattgactgtcattccttgctgtctccacttttccgctaggctcatcattctaatagaatcaagcccaaggtagacgagattctcgtcaagcggtatttcattcggcttgatttcgagatactcagctacttggtgaaggatggcctcaaaagataggtcatcgtctgcttcctgtcctgttaaacgactaatgatttggtttgtcgttgtggtgaccgcacagcgttcagctgcataggtcattgccattttgtgatgcttaagtgaaaagtcagcaacggcatcggcgacaaaaaaggtttcaatatcgagcatgaatgcttctgcggctgtcagcatacagccaatatgtgcatatacgccagtaatgatcagttgatcacgcccgccttcttgaagaatatctaaaaaattggattttttgaatgcgctataacgccattttgtcagcattgtatctgcttcagatggagcaagctgatcaatgatttttgtcaatgcttcatcatcaccaagtccaggtccccaaaaatctgttaataaggcacgatccttcgggtcttggtcaccaggttgagcagtatagacgactggaattccaagttcattgcatgtattacgtaattgttcaatatgttgaactaactctgtgatcggtgatgtatcttgttgaaatgcatttaaaaaatattgctgcatgtcatgtatcagcagaacagcacgtttcggatccggtatccagttcactttattttcgggtaaatcttgtgtgctcggcattggatacgcaggaatagtagggattgccatggttttcactcctctttttttatacgttggcagtatggattgcagctaattctcttaatgcttttttactgactttgcctacacctgtttgtgggaacgcatcgatccattcaatgcggtcgggaattttataggcagcgagcccgcgttctcttagaaatgactttaatgcatgtggtgctggcttgttgtttccttttgcaataacaaaggcacatgagcgttcgccaagaaatggatctggcatggacaccatggcggcatcatgaatgtcagggtgcgcaagtaaatggttctcaacttcttcagcggcaaccttttcgccaccacgattgatttgatccttgtctctgccttctacaacaacatttccttctttggttaatcgcacgatgtcacctgttctgtaaaagccatcgggtgtaaatgcttttttgttttgttcatcagctttatagtagccacgaatcgtataaggtcctcttgttaaaagatgtccagccacttcattcgggacgggcttgtcctcatcatctaccactagtacctcatcatattcagacatcgggcgtccttgtgtatgaataatgacatgttcaggatcatttaatctggtatagttgaccagaccttctgccatgccaaaaacttgctgtaatttacacccaagggcaggcatcactcgttttgctgcctcagcactgaatttagcaccacctacttgcaagacctcaaggctggataagtcatctgatcgatgaggagcagcctctagccaaatcaatgcgataggtggaacgacagcggtaatggttgctcgttctttttcaatgagtggaaagactacatcagggcttgatccaggtgcaagaacgactcttccaccagcgtataacgtcccaaggactccaggcgagcttaatggatagttgtgtgcaactggaagtgtagctagatacacactatcttgtgtaagctcgcacacctcattgcttttccaaagactatacatatagtcatcatgtgtgcgaggaatgagctttgaaaggcctgtgctgcctccagataactgaagaaacgcaatatcgcttgcctctacatgaatttgaggatcgagtgatgggtctttgcgcagatcatccaaggaaaggaattcctcagcttcccctgcaacaatgacatgaggtaatgagggaagcttttctttcacttgacgtgcgagtgatcgataatcaaagctaccatcgatatctggtatgacatatgcgtctgcttcggcaaactcaatgaaataagtgatttcactgcttctatgagatggtagcgagaagacgggtaaagcaccgattcgaaataaagcgaaaatgacttcaaaaaaagcaggaatgttaggaagctgaacgacaactcgacttcccttttgaattccaagctgatgaaaaccggcggcaagactgctgacgcgctcatcaagttcttggtagctcatgtgcgtatcagcatatgtaattgctgttttattccctaacgatgcggcgcgttcacgaagcatgccgctaaaggtttccccacgccaacagccgttttcacggtagcgttttgcaaattcttctggccatgtaggtggttgaacaaacatgttttgtcatctcctatgtatttttataactgatggatgcccatcgcatgaagcatcgtgttgaattttgcagatgtttcggctagctcttcttctgcctttgatcctttgaccactcctgcaccagcaaagaggcgaagggagtgcccctcagcttctgcacaacgaatggtgacaatccaatcaccatcaccatttgcatctgaccaaccgatcattcctgtgaaaaatcctcgatcgaagggttcaatcgcttggattgcttcacgagcatctgctgtaggtgttccgcatactgcgggtgttggatgaaggctaagcgctaaatcaattgaggatacacctgcatctgctaattcacctttaacgacagtagataaatgccacatcgtttctgtttgtatgacggatggtgatgcaggcacatctagtgtatgacagtaaggagcaagcgctttagtgacagcatcgacaaccactgcatgctcgtgtaaatccttcgctgaagtaaggagttcatcgtgacgacgctggtcttctactggatctgaactgcgtggccgagaaccagcaagtggattggaaataacagttgaaccagtttttgaaagaagcagctcagggcttgccccaagcagtgtgcgcttttgggaagattccgggtcagctacatttgtagcaaacgtatagccagtcgtattatgacgagcaagtcgttcaagtattgctttcgtattaatttctcgatttgatttgagatggagagatctagagagtacgattttgctaagctctcctttctcaattttagctaacccttcgttcacaccattcatgtagacatctggagaggggacaggtgtcacctcataggatggagctgccatttccgactcctcatcaccttgatgaaattcgagtggatcactaaactgtacatggattggaacacttaaacgaacgggttgcgccggatcaaacggaacagcaccagcaacaatcggtgttcgaataccagcttgtttggcagcgtcaaatacgtgagctacccttgtggatagttcatttagctgattggtttcaatatgctggaaaatcccttctgccagtatcgtacgtttaggggaagcaaggaaaaaagcgcctggctgatagtcttgaatcaactgtactttttcttctgacgacaatattgaatgtttcatgaaaaggcctcctttttgatgaaatgctagattccgagtgttgcgccaccatcaatcgtgagattctgcatcgtaatatgactggattgctcagatgcaaagaagatgactgcatcagcgatgttttgagaatcagcgattttttgtaaaggaataccggttttatacgtctctaatgaacctttaatcacctgatctgctccttgttcatcagaccataaagcccattgcataggtgttgcggtagagccaggagagacgacattgcatctgattccataggctgctagctctaatccaagcgtttttgtaaaggaagtagctgcggcttttgatgcggcataggcagccatattcattctagggatggcacctgcgttagagctgacggtcacaatgaccccttctgatcttttcatcatgtatttggagacagcttgagatacgtaaaagacaccatgtgtgttgactgcgaaggtttgttgccagtcatctgcacaaagctggtcaatagaaccgattcgaagaatgcctgctacattgactagtaaataaatgggtccgagctgcttttcaatttgatcgacaatgtgctgaacagaagcttgatcggtaatgtcacctggataggcaaaggcgcgtatgccttcatcattcatttgttggatggtgctttgcagctgatcttcatttgcgtcaactgctgcaatgatcgcaccttcttcggatagtctttttgcgactgcttgcccaataccttgtcctgcgcctgtgataagggcaatcttttgagatagaccactatgtttcatgtgttcactacctttctttcatgtctgtggttgttaaaggatcatcatgatagagtgcaaaacggaaagcgtaattcatcagcaccggtaaaacggacgtatgtccttcttcagggaactcatgataggccgtatgtaagccatatgaggataaaggcaacatacgatttgctagtgactttgcatgatcattcatttgacatggatgatgtttttctagctcacctacacctacaaacagccttacatccataggcacctgacgtatacggttggtgaattggtattctttttctagaaataattttttattccagtggatagaaggactgcccgcaatatatgtctgataagcatcagggtgctcaaatagtgtgtgtaatacaaaaagaccgccaagagaatgcccaaacagtgtttgacgactcaggtttatcggaaagcgttgctcgatataaggctttacagtcttttctaaaaaagaaaagaaagcagaggccccgccatatgtatggatggagaagtcctttcttttgcccccaatggaagcgtcagggctggtaagagtgagatcataatgcctgagcggatgatagggcgcttctgtctgatagccaattccaataatgatggcaggtacgacacctgttttttcaggtcttcttgactgtaaacgaatggcttcgaccattgtgccaaaaagtgaattcccatcaagcacgtacatgactggaaaaccagccgctggaggagtagtattcggtttaaatataaaaagtctgtatgggtgtgctgtaatatccagttgctccgtcccagatataaagaaaggacggctttctccgaaaagtgaatcctcagtacccattccttcagggcgtttggacatatgtaaaaaatctccttcctcaaattcgaccctcatacgatgataaaaacaggcttgcggatattggatgagtgtagtaattgaagaatggtttctccaaatgaaaatgattctcaactatcacgcaagcaaatcaaatgataatggttatcaattatgaagtcaaatgttcataaagttgtgtatttgatatttcaatcttaatattcagaaaataacagactaactcactaacaaatgatttgaaatagggaataccggaccttgtcatttaaaaagaggagaaatgtcaaaagaccttgactgcctcggaatatttaccattttcttctgtttgattcaggaataaatataggtttttcttctcgaaataattttgaggaaaaatgagtctatagaccctcttatatttttaggcaaaaagaggaggattttgcaaaaagctggtgatcatatctcacaacttattcaatatcatgcgtagctgttttaaaagtggcgaagtatagcatcaaaaatgacacaattaaaaaagtaagggaatgtacccttactttttgatcaattggtgaacatgtctgtaaacaccattaaattagaatccatctgtgacatcatattcgtaacggatatcggctttgacattgctcatagtagatctcgctgtagcttttgcgttgtacttaaagctccatttttgagcgacttttaattcatcttcaagagaaatacggtaagaaccgcttgttgcagaagaaaaaagtgatgtgtaccaaatattactttcactagccatcagtttgtgtgtgacattgccttggttgggtgtttgggtactagttgtcgtaatcgatttaactacagcacgtttaggaactgtggaattattagttaaatccattgtaatgactgaagaatcaactcctaaaaaatttaaagaagaattccccaagttggtagaagtccccgtaaaattgaatgtcccattcccagatttaatacgatcttgaatggaaacagtaaagtacatattccctgtatatgtaccacgggtcactttcacaaaataagtctctgaagttgatgtaacttcaccagtattagcaaaaataaaaggcgttactgaatcaggattaataacttcggaccctgtcctagaatatttagaattatacacctcgatattcatccctgtatattgcttattataagaacttctgacataaactctttcacctttattgatcgtaaactgataatacgcttcattttcaccttcaggtaagattgttgtatctggacgactatttttccaatatcccattgaacttgctgtgttaggactgttattccctgtaatagctgcttccgcagaattaggtgcaaaaaaactagtaacaagcactaataccaatgcaggtaataaaaaacgtttgaagatagtatttgtcatattttaaccctccttgtaataattactatatcggatcaaaactaacaaattttaactgaattgccgatatatttaataatcactatttttttaaaaaggagaatcaaaatgaatattaatacgtcatacacggcaggtgcttcaaacaatcagaaccgaatcgactataaaggtcaatcagctattaaaagtacaaatgaggtgatgaccgaagctgatagacggatgaaaatactagatgaaaaatacgaaaaaataaatgaacaaaataaacgattcaaagatcctcaagaccatatatataataagtatagaaacccttattcttcttatttcagaagtgatctaacaaaaccggaaagagaagctgcttacattatggaaatgagttgggcaaggaataataaaggaggtcaatatgactttaatgacgccatcttccgtaatgaaaaacggtacgatcctacccaagaaagcgtagagaaaaaaatattcaatcggcaaaaggtcaacgaacaattgcaagatttattctctaaaaacggtataaccattcctaaaaacacaaatttaacttttaccattgacccaaatcatttcaaattattggtgagtggttcaacagacgaatcgctgaccaaacaaatagaagacctattaaatacaaccaacaatacaagagaattatttttccacatcatgaaaagcagatctgacgattctactcaattcacgcctgattctcttgccaaattccaccttgttaatcaaatcaaaacggtcacaggctacaatttaaaagatttaagcattgtaaacggtcaatttgtaacggataaagggaagaatatttttgatatatacaaagaagaactcctgaaaaatccatacacagcagaaaatgcacgcattgccgcttcacattacggagcacagctatttgatctagccaaaaacggctttgattcaattcccgatttggtgctatctattggttatcaaaacgggtctttacaagacattgggcaaaaagaaaattatggagttaagaaaacgatagattaaaaaaacgcattcgaacatgccgtgttggagcatcgatcacaagtgtgaacttcaacagataaaaatccgatacagaaggactctataacaatttatgttacagagtcttttctattgaaatgcgttggttggctgttcaacgaaacatcctcatggtaattttgactatagtcgatgtttttcacttttttattgatgaaaatgttaaaatgatgagtagcgtatttttatatgaaaggacggtgcttggcatgacggaacttctcgatgaccggctgccgccgcaaaatatagaagccgagcaggccgtattaggtgctgtttttttagaaccatctgcgctcacgctcgcttctgaggtattaattccagaggatttctatagaatgtcgcatcaaaagatttacaatgcgatgcttgtacttggtgatagaggggaaccggtcgatcttgtcacggtgacttctgaacttgccaatacagatttactagaagaggtaggcgggatttcgtatttaaccgatattgcgaactctgtcccaactgccgcaaacattgaatactatgcaaaaattgtagaagaaaaatcaattttaagacgtctgatccgtacggcgacaaccattgcacaggatgggtacacgcgtgaggatgaagtagaggatctgttgagtgatgctgaaaagaccattatggaagtggcgcagcgtaaaaactcaggagccttccaaaacattaaggacgttcttgttcagacatatgataatattgaacagcttcataaccgaaaaggcgatatcacagggattccaacgggattctctgagcttgaccggatgactgctggattccagcgaaatgacttgattattgtcgcggctcgtccatcagtagggaaaacggctttcgcattgaacatcgcacagaatgttgcgaccaaaacggacgaaagtgtcgccatctttagtttagaaatgggagctgagcagctagttatgcgtatgctttgtgcagaagggaatatcaatgcacagaacctaagaaccggtaatctgacagaagaggactggggcaagctgacaatggcgatgggctcgctatcaaatagtgggattttcattgatgatacaccaggaatcagagtaagtgaaattcgctcaaaatgccgccgtttgaagcaagaaaacggtcttggcatgatcctgattgactacttacagctcattcaagggagcggacgatcaagcgataaccgtcagcaagaggtttctgaaatctctagggcattgaaatcgctggcaagggagcttgaagttccggttattgctttgtctcagctttcacgcggagtagagcagcgtcaggacaaacgtccaatgatgtctgatattcgtgaatcaggaagtatcgagcaggatgccgatatcgtggcattcctttatcgtgatgattactacgacaaagaatcagagaataagaacattattgaaatcatcattgccaaacagcgtaacggtccagttggtacagtatcactggcgttcgtcaaagaatataacaaattcgtcaatctggaaagaaggtttgacgatgcgggtgttccgcccggtgcttaaagcccagctcaagaagctgggcttttttttgatgatctacatcgaaagaatgattgaaaaacggtcgaaatgaggaggagagggagagagagaaatcgtatactaaaaggagaaaaggagtgatgactgatgaaatttcaacagttcgaagccgctcaattacgcatcgcacgtccaaccgtcaacatggaagaggttgtttctttttatgaaaaaggcttagggctcaaacgaataggttcatttgatcagcatgaaggatacgatggtgtgatgctggggcttcctcatcagcatgttcatttagaaatcaccaaacatgaagaagaagagagcctgcccgttccgcatccagaacagctgcttgttttttatattcctgatgaacaggagtttcagcagatgaaagagagactgatctcatttggcggacggcaagtcacctctacaaatccatattgggaacggggaggagcaaccattgaagatccagatgggtatcgcattgtgctcatgaacacagaaggaattacccccgtttaaaaaagactcccatgcttggtgggagtcttttctgttatgaacgaagtgtgacgcgcagcttcagctctttcagcccatacatgccgctgtttgtcatcggcatataggagaggagctctagtgactcatatcggtccaataaggccttgatggcagtacatgcttccaagcgggcaagtggtgcgccaagacagaaatggatgccgtgcccgaaaccaatatgagggttagggtgacggtgtatatcaaattcatgtgcgtttaaaaattgacgctcatcccggttggcagaagcaagaaacacaatcacattgtctccctttttcagcacttttcccccaagctctgtgtcttctgtgacatagcggacgatcgtaggagcgggtgcacggaaacggacggcctcctccacagcacgcgggatgagctcaggtgattgaacgagcgcttcatacgcacccggctgttctaacaagctgaagatcatattggagatcaggttggtggttgtttcgttgccagctaaaagaagaagattacagaatggaattaattcacccgctgacagtttgtctccattctcctccgcttgaataatgagagaaatcaaatcttcaccgaggttgtgacgtttcctttcaatgatgtctgcaaaaaacgccatcatgtcagcctctccttggtcccgaattttctgccattcagcgacatcctcctcatcttcacttttaggcatactgacgagaatatcagaccattctttaaaggattgtttatgctctgacggtacacctaaaagctctgcaatgacaatgacaggaagcggataagagatggcttgcactaggtcaatctcgtttttcccttctatttgtgccatgagttcctccatcaattcttgaatacgcggctcccacaatttcatgactcgaggtgtaaaggctttgctcacaatggagcggattcgagtgtgtttgggagggtccatcatcaccattgttttcatcaatgaatgcttccgctggtctttaggaggctgactagaaaaggtatttttatcgattgtcacacgttttgcttcctcataggtgaatacactccatgttcggctggcttcgtcaaaatgaacaggtgatgtctgacgcatgttggcataccaatcaaatgggttatacggatcctgcttgttttttcctcttaataacgctttttgcacggcagttggtgttgttgtttccatgatcatcactccttataggttgtcagatgcttcctttttttcattgtgttagattaaagttaattcatcagccttgaggattcaaccaacagaaaagcggaatctgttgaagttcataggaaggggagaatggcttgtggcggactgctacagaggggataagcgtgcaacggaatcgaagcagcaattaagaaaagcgttatttcagttattaagagaaaaagagtgggagaagatttctgtacaggatttgacgaaagtggcgggcatccaccgcaccaccttttatcagcattatgaggataaatttgatcttgcccagcaggtgatggatgagatgtttgatgtgatgaaatgtgccatttttgctcctgtacaagaagatgatgtgaaaaaagagcatgcggcttatgtgtatatttttcgattttatcagcatttgcaggaacatgaagaggagtatcaaattcttttgaaacgaggacgagagctcaatattcatgaaacggttcgtgctttttttgaagaaagcttttctatggggttagaggaaatcgcaggctcaaagcctcatccacatctcgttccaatcgacatgcagcagcaattcgtcatttctgcttatgttggaacagcagaatggtggttgaggacagggagaccgtactcacctgattttatggcaagctcgatgattcatttaattgaaaatcaatagaaattaggaaccatcaaaatagttgtttttactcaaaatctccctttttaagcgctgaagaagtgattaaagcgctttttctcataattaaaacgaacaaaatttgatctcgagatattaatgttcggatttcacgttgactttttcgttttgcattgataaaataaatgtgtttgaaagagataacgttttgaaaggttaacggaggtgcacgatatgtcttcagtagtcgtagtaggtacgcagtggggtgacgaagggaaagggaaaattaccgatttcctttcagaaaatgcagaggtgattgcccgttatcaaggggggaacaatgcaggtcacacgatcaaatttgatggagtgacttacaagctacacctcattccgtccggtattttttatcaagagaaaacttgtgtcatcggtaatggaatggtggttgatcctaaagcgttggtcactgagcttgcgtatcttcacgaacggaatgtgagtacagataacctcagaatcagcaatagagcccatgtgattctgccttaccatttaaaattggacgaggtggaagaagagcggaaaggggctaacaagatcggtacgacgaaaaaaggaatcggaccagcttatatggacaaagcagctcgtatcggtatccgtgtcgcagatctattagatcgtgaagtatttgaagagaagcttgcacgtaatctagaagagaaaaatcgtcttttagagaaaatgtacgacacagaaggcttcaagattgaagatattttagacgagtattatgaatatggccagcaagtgaaaaaatatgtcgtggacacatctgttgtcttgaatgacgcactagatgaaggccgccgtgtgctatttgaaggagcacaaggcgttatgcttgatatcgatcaagggacatatccatttgtcacgtcatctaacccagtggctggaggagtgacgattggttctggtgtaggaccaacgaaaattcaacatgtggtcggcgtgtcaaaagcgtacacaacacgtgttggagatggcccattcccgacagaactccatgatgaaattggcgatcaaatccgtgaggttggccgtgaatacggtacaacaactggacgtccgcgccgtgttggctggtttgacagtgtcgttgtccgtcatgctcgccgtgtgagcgggattacagatctatctcttaactcaattgatgtactgacagggattgaaacattgaaaatctgtgtcgcttataaattgaacggagaaatcacagaagaatttccagcaagtctaaatgaactagcgaaatgtgagcctgtctacgaggaaatgccaggatggacagaggatattacaggcgtgaagaatttaagcgaactgcctgaaaatgcccgtcattatttagagcgcatttcacaattaacaggtattccactttccattttctcagtcggaccagatcgttcccaaacgaacgttgtccgcagcgtgtaccgtccataataatagactgatcagacaccagtaaaattgcacattttactggtgtctttttgtttaaatatttcttaatttcagtagaacaggcttccgatcattaccaaaatatgataactgtatagggggaaggagcgttctagtgaaagaaagaataagattattagatattttacgaggttttgccatattaggcacattgggaacgaacgtctggttttttgcgtatgcaggggatacctttgcgacagatcagattgcagatgaatatgaacatggcagttttctagaaagccttgtttccatgttcgtctatgggaaaatgctctcactgctcacaatcatgttcggtgtagggctagagctgaaatatcagcaggccaaaagaaaaaacatgccttggccaggtacatatttatggattcttttatttttatttatcgaaggctttgtccattttgcacttgtgatggaatatgatgtgctcatgagttacgctgtgaccggtttgcttgtggcatttattgtacgaggagggagcaagcgcatcaaaagaggcatgatgttctctggagtcattcatttgcttgttctgtcctgtctgatggtgttctccctctctgaaatggagacagaatcgtatgatcaaagcagtgaaccggcgctggaagagcagctgccagagacatggatctcgcaggttcaagaacgattacaacactttttcatgtaccgtgaagaagcgatctttatcattccaatgaacacatttctgtttttattaggtgtgcggatgatgagagccggtgttttttatgcaaacgaacgcgggcaatctctacggaaaatattattccgagtcggtctgtgggtgggtctgccgctgaatgcacttgtcttcgttccgaacgaactagtggaattcgttgtgcgctatgcgttttcgccattcctttctcttttctatatcgctgtcattgcgaagctcctggttcacacggaatcatggttcatgtggaattggtttgaatatgtagggaaaatggcactcagctgttacatcctgcaaaatatcatctgctcggttcttttttatagctggggattgggtcttggtggacaaatcaacgcccctcttatcgtattggcatggctgctcatttcacttctgcaaattgccatatcagcatgttgtctaaaggtttggagaatgggtccaatggaatatattcgttcgcgggcacttcgccgggtgacgatgaagaaggcagcataaaggggaatagctacaatgttttttaaaaaaatgacgaaaagagaacaagcgaattcacataaagcagttgtaccagcgtttgtcttttatcttctcgcattaggaggacatgcgctgtactcgtatgtcgaaggtgacagaccacccgtcacttttgtgattctcatggcgggtcttcttgtgtttttcgccgcagactggctatttaacaaaagacaatcataaaaaaagagccctcattacgagggttctttcttatttcatgcttttatattggccttttaagtttttgcggatgtactgaatgattttgcgcagttcgttggcatgcggtctgccaaacggacttgtttgtctttgctgatagagcacttgccctttttcatttaataagaaataggcgggttcaccgtgcaccccgtggtcttcatatggggcatcttccccgtgatagtggacttcatatgcttttaaagacgtgaggtcatggtcatacatgatcgggaaggacagtccctctttatccgcaaatgccttcaagtcatcagggttatcggttgaaatcgctatcaagtgaatatccttgtcctgaaaatatgactgctgctgttcgagctcttttaattcttctacacataccggacaccaagatcctctaaagaaaacgatcaggtgccagctttgatgctcctctaaatgtttgtcgaaatcaatgtgatcgccctgtattgttggaagtgaaaagttgggcattttatctcctaatttgaatgaactcatactgtttcctcctttttcaatgacaatgtcacttgtttcatgtatagccatttttgagcggcctgaaacgtgtctatgtgtttgaataggcagagatcatccgaaaagacgtgtaaaatgaaggcggttgcagaagtggaggctttgaaagcagatttgacatccgacactttttttaaaaaaatgtcgaaaaacgtattgccatatgtaattactctatgatattataaatctcgttgttgcaaaggtctctgaaacttgttaggatgcgatgttccagcttttttaaagcgattggtttgacgcaatacggcttcttcagattcacttttcacaaaccgagagccattagctcagttggtagagcatctgacttttaatcagagggtcgaaggttcgagtccttcatggctcaccatgtattggcccgttggtcaagcggttaagacaccgccctttcacggcggtaacacgggttcgaatcccgtacgggtcattgatttactttagcgttaagctaatttttcctcacttgcttgaaggagcaccacgattgctttttcgggcaagttactgaggtccggtagttcagttggttagaatgcctgcctgtcacgcaggaggtcgcgggttcgagtcccgtccggaccgccatttatacatattcatcttttgatgatggctcggtagctcagttggtagagcaacggactgaaaatccgtgtgtcggcggttcgattccgtcccgagccacttccaaacgcatctgcaatcgcaggtgcgtttttcttatgaaaagaaggcataaaagggagaagccggacctaggtagggcccggctccataagaagaagacgttacatctatatagacgattggtgactggaaaagtttcaataaaaaaggaaaaaagccatcaatttttttgagaggtgacttcctattcaacgtttactagaaaagaaagccgttattatttttatctttgccacgtaaaacgttataatagacagtgagccttttttgctcaaacgaaaaggcctgatgagagatgcaaaatggaatgacatagatgctaaaaatgcaggaggaaatcacaatggaaaaaaagattcttgtcgtagatgatgaaaaaccgattgctgatatattggagtttaacttaagaaaagagggctatgaggttcattgtgcatatgacggaaatgaagcccttgaaatggtagaagaaatcaaaccggacatcattctgctcgacattatgctgccgaacaaagatggcgttgaggtatgccgtgaagtgagaaaaaaatatgacatgccgattatcatgctgacagcaaaagactctgaaattgataaagtcatcggtcttgagcttggcgcagatgattatgtgacgaagccgtttagcacgcgcgagctgcttgcccgtgtgaaagcgaatttgagaagacaaattgctgcgccgcagacagaggaagaatctgaatcaaatgatattgagattggatcacttgtcatttatccagatgcgtatgtggtgtctaagcgtgaggaaacaattgaattgacgcaccgtgagttcgaattgcttcattacttagcgaaacatatcggacaagttatgacacgtgagcacttgctgcaaaccgtatggggctacgattatttcggggatgtgcgtacagtggacgtcacagtccgccgtcttcgtgagaaaattgaagacaatcctagccacccgagctggatcgtgacacgacgaggcgttggctactatttaagaaacccagagcaggactaagattcttatgaataaagtaggtttttttcgctcgattcacttcaaattgaccttaatttacgtgctgctgatcattgtcgccatgcagatcattggcgtgtactttgtgaagcagctagagcagtccttaattaattcctatgataattccttgaatcagcgaatctactcgttatcgtattacctagaacaagattcatcgaaaagcaaggcagaattaaaagaggatgctcaaaagatattaaacgactttaacaacaaagatgagtctaatgaaatttctgaagtcagctatattgacgaaagcagagaggtcattgcctctgtgaataatggcagtcaggagattgccgggaagaaaatcactgatcaaatcattagccgtatttttgcggtcggcaaagactatgaaaagaaattctatgacccagaatccaataaacgggtgcgtatttctgcgacagccgtgaaaaatgaaaaccaagaaaccgtcggtgtgatttatgttgtgtcttcgatggagagcgtgtttaaccaaatgcgaaccattaacactattttggcgactggcacactgatcgcacttgggacgaccgcactgcttggtatcttcatctttagaacaatcactcatcctatttcggatatgagaaagcaagcgatcgagcttgccaaagggaatttttccaggaaagtccgaaagtatggacatgacgagattggccagcttgcgacaacctttaaccatctgacgagagaactggaggaagcgcagctcatgacagagggtgagcggaaaaagctttcttctgtcattgcctatatgacggatggcgtcatcgccacgaatcaaaacggtgcgattattctattaaacagccccgcattagagctgttaaatgtttcacgtgaaacagctctagagatgccgattacgtccttactgggcctcgaggacacgcatacatttgaagatttagtcgaaaatcaagattccatgctgatagaaattgaacgcgaagatcagctgtctgttttgcgtgtgaatttctcagtcattcagaaagagcatgggaagattgatggtttaattgcggtcatttatgacgtcacagagcaggagaaaattgatgcagaacgccgtgaattcgtcgcaaacgtatcacatgagctacgcacaccgctgacgacgatgcgaagctatcttgaggcactggccgaaggggcaattggtgataaagagcttgcgccaaggttcctcagtgtcacgcaaaatgaaacagaacgcatgatccggcttgttaatgacctgctgcagctgtctaagttcgacagcaaggattatcaattcaaccgtgagtggacgaattttatcaggtttatctcattggtcattgatcgttttgaaatgacgaaagagcagcatgtcgagtttatccgcaatctgccgcagcgtgaaatatacgtggaaattgatcaagataaaatcacacaggtgctcgataatatcatttccaatgccatgaaatactccccagagggtggacatatcacgtttaccgttgatctggatgaggagaatggccttgtgttattcagcgtcaaagatgaagggatcggtattccgaagaaggatatggataaaatctttgaacgtttttatcgagtggataaggcgagaacaagaaagcttggcggaaccggcctaggacttgcgattgcaaaagaaatggttcaggctcatggcggagatatttgggctgacagcattgaaggaaaaggaacaacggtgacctttacccttccgtacaatgaagaacaagaggatgattgggatgaagcgtgagacctttaaaaccataatattgacaatcctaattgcaatcagtcttgtgtttacgtggaatatttggatgttccagcccgtcatgcaggaccaggcagatgccggcacacaggtcgtggaaacgaagaagatttcaagcgatgagcctagaagtctcattgatgtcgtgaagccgcgcgagatgttcatccattcaaatggggagcactttaaagtcgatcaaaaggaactctttcaaaacttctggaatgatgtgagcctttgggatgtcaaagagatttcggatgtgtcggatcaatattctgagcagagatttaagaatttcttctatggaagcggaggacaggggaagacattggatcttgtgttcaatgactcgattccgattgatattttccaagcgctgtttaaatggccgaataagtccattgaatacaactcgtttgatcggatgattgtgccgttctcccagcaggacaaggccaataagaaagtctatttggtttcatacagcaaggaaacggtgcttgagctgacaatagaatccgctaactatcggaatctaatggacagtatctcagccgctcaaaacgagatgccgcgctacgatctctatacattctcagcgaattctaaacgagatttcctccttccgagaaagcaaaagcagcttgaagcgaaaatgttctttatcgaaacgattaagacaagcaaattcaaggacgctctgtttacggacccgagtcttgtgggcgaggagtctaatttaaatcggacagtgtacacagatggcacaagccgtcttgaagccaatcaaaaagaccaccgcatccaatatcagcaccgcaatatcaattccagcaccgttttccaaacgggggatttgatcaagcgaagtgtgaagtatttcaatgatacggggagctttaccgatgactatcaatactttggcatcaacagcaaccagcagctttcctttaatatgtttatggatggtctgccgatcgtcaacagtacaaagcatccatttgggatgacctctcttgaagtacagtgggcgaatgatgacatcttgaattacaagcgtccaaactatattctaggcaacaaagcgagtcagagtgaacaggtcaagctgatgaacgggacagagctgaaggacttaatcgtcaagcagacgaaatatgatgacctggagaaaattgaacaaattttcccggcctatcaagctgcttcaaccgcatcagatcaagatcaagcgatgtttgtctggctggagccagtatggtgcatgaaatataatggcaaaaccgtgatactatcgcatgatttgttgacagaggggagcgagaataatggagtggaataagaccaaaacgatctttatcctagcctttctcgttctcgatatatttctaggttttcaatactttgaaaaacgatcaaccgatcattttgcgattatcgaaaaaacggatacgctggaagaaatgaaggcagatgggatcaaatatggcaatctatcagatgaagcgaagattggataccgcattacagctgaaaagaagcaatatacgaaaaaggatgtcgacggattagctgatcaaaaggcgaaaagcacattcccgaaaacggacaaagatgatcctgtcacactgcttgagatgaccttcaataaacccgttgcattgccaaaaaaggatataaaaacagcggcgacaaacctcgtaaaccagcgtttgctggatgggaagaattataagctgtggagtattgatgaagagacagggaagatcgtctttttccaaacgtataaagggaaatacatcttccaagaaggccttgatgacaccgaaaccatcgggaaaatcaccttagatgtaaacgatcaaaacgaggtcgtgtcgtatcagcagtcgatggtgacgtcgattaatgaagtgagaaaagaaacccttgtcccagcccttgaaaccgtgaaggacttatatacacaaaacatgctgagccaaaacacgaccgtgaaaaaggtagaacttggctactatacgcaatacccgggtgcaagcacgcaggtcatggtgcctgtatggcgagtcgagcttgaaggcgtatcagttagttcaaagaaaaagacagaagaagaatatttgatcaatgccattgatggctcaacacttgatcatatagagaaagatgacaaatcttcaatggagtgagagaacatgagcttgcagttcagtgtactagcgagcggaagtacggggaacgctttttatttagaaacagacgagcatgcctttttagtggatgctggattaagcggcaaacagatggtcgagctgcttggtcaaatcgaccgcaagcctgaagacttggacggcatttttgtgacacacgagcactcagatcatattaaagggctcggtgtcatggcaagaaagtacaagctccctgtctatgcaaatgcgaaaacatggaaggcgatggagtctcatatcgggaagattgacacagagcaaaaattccactttgatatggaaaccgtccaatcctttggtggtctcgatgttgagtcctttggcgtctcacatgatgcggctgagcccatgttttacgtgttccattatggcgggcgcaaacttgccctgatgacggatacaggctatgtgagtgatcgtatgaaaggcatcattcagtcagccaatacgtttgtatttgagagcaatcatgatgtcggtatgctgcaaatgggccgatacccgtggagcattaagcgcagaattctgagcgatgtcggacatgtatcaaatgaagatgccgctcttgcgatgacagatgtgattggagatgcgacctcacgcatttatttggctcacttgagtcaagacaacaacatgaaggatttagcccgtatggcggtccagcagacgcttgagatgaagggctttgttgtcggggatggctttgatttatatgatacggacccgaaaaaagcaaccccgctttgcgccgtatgatttttacaatcgtatgattaagataagagcttcttaccaacactatatacatcatctattcactgaaaggaaggaaacatagtggattatcgcgatgtagagtggaagccgagacgaagcagaaaaggatatttcctatctggtctgatcggtgtattggtaggagcttttttaatgggattctttttcccctatgtgtcaggacagagcggcagtccctttgggtggcagcagaacggagatgagcaatcagcacagggccctttaaagaccgtcaatgtgaacgtcaatgatgcggtcacgaaagtcgtatctaatatgtcggatacggttgtcggcgtcattaatatccaaaagtcgagcttttgggaagaaggcggggaggcaggcagcgggtcaggtgtgatttataagaaaaagggtgataccttttatatcgtgaccaaccaccacgtcatcaaaggcgccaaccagcttgaagtgagccttcaggatgggacaagaattggtgccaatcttgttggaagcgatcagctgatggatttagcggttctcaccgtcaaaagtgataagatcaagaagaccgccgcctttggcaattcagatcatgtgaagccaggtgagccagtcatcgccattggaaatccgttagggcttgaattcgcgggctctgtcacacaaggtgtcatttcgggaacggaacgtgcgattcctgtagattcgaatggggacggacaggcggattggaatgcggaggtactgcaaacagatgccgccatcaatccaggcaacagcggtggtgccttgatcaatatggacggaaaagtgatcggcatcaactcaatgaagattgctgaatcagaggtagaaggcatcgggctgtctatcccggcgaatctagtcatccctgtcatagaagatttagagcactacggagaggtgaagcgtccgtatctaggcgttggcatgaaatcattagcagatattgcgagctatcactggcaggaaacgttgaagctgccatctaaagtcacatcaggggttgtcgtgatgagtgtcgagtctttgtctccagcgggaaaagcgggactaaaagagctggatgtcgtcacctcctttgatggcaagagtgtacagaatatcgtagatcttcgtaagtatttatatcaaaagaaagtcggcgacaaggtaaagatggagttttaccgaagcggaaagaaaaaatcagtagaggtcaaactttctcaaaccgaccgattcggcggatgaccagttccttgatgggactggtttttttcgcatgctcatcatatgattgaggaaagggggcggtacgaattggttacactacaaccaatgtcacaaacggattacgatgtattgatggagaaggccattcagcggtacgcagaagaaaaggtactcgcagggacatgggaaaaggaagaatcacttgcaaacgccgaagaacaatttgatcggctgcttcccgaaggtctgcagacagagcatcatgagctatggaatttcttgaacggggaagaagcgattggctgggtttggctttgttataacccgaatcaccctcagcaggaaggattcatttataactttattttattcgaagcttatcgaggtaaaggctttgcaaagcaggccattgctgcattagaggagcaggcaaagtcattaggagtgcaaaaactctcgctccatgtctttgctcacaatcaaatcgcccgttcactgtacgagaagaccggatttgcagaaaccggaatctatatgagtaaacctttataaaaaagaagaagtaccgtgcggatcgcgtacggtacttttttatgaagtgctcatggcatcctgagccgtgactctgtataaatcgactttgcatttcacgaaagcgcggatgatcgatgggacttgggcttctgaacgaatcaacaatgaggtctcgtcatcactgatcacaagatctgttccgacagtttgtaagtactgcgtgagaacaggtttcacctcatcatcaatccacgcatgcttgaaggttgcacgtatgtttgaggatgtgatggttttttcttgaggatgagtatggggggacactaattttccttcagaaatgaatgccgttttggtacaaatactatttgtgaaccttgggcggtcagccgttaaaaagacggttttcccttcatgttttaacgtttcaatgacctgctggatgtgcaagatcgaatcagcatcaatatcggcaaaaggctcgtctagtaaaataaattcgggccgatgggcgatggcctgcgccattccgagccgcttcttcataccaggtgtgaaggtaccgaccttttcctgatgatagtgatgtaaaccgacaaattcgagcagttcttcataatcactcgttttctggcgtgtcccggtgattttggataagtaggcaatatgttcaagtgccgtgagcccttcatataaatccgtatattcaggcagaacaccgatatgctgcctcaccttttttaatgaaggcatatccatcatcgtaaacgtaccagaggttggccgggaaattcccgtaatgatattgaaaaacgtcgtcttaccagaacccttaggtccaatgagtccgaagatatcgccttgattgacatcaagggtaatgtgatctatcgcgacttttgtccgatatttttttgtgagctcttttgtatgcagcatttagacatccctcctttgaaataggagtgctgttccaatgagtaatacaacggttaatgctgtattcatgagtacataggtcagcggttcactcaagcgtgcataataataaggcgtcatatattggaaccaatgaatcaatcgttctgaagaaagaacagatatcatactgacgatcgggaaaagaaaggaaaacaacatcccaacaaacattgatttctgcggtgttggaaagagcatggacaaaaataaagtacatgagataccgacactgataaaggttaagatttttaacgcatcagagaacagaaaacgatgtgaaatcaccatattcagtacgtaagtcgtcataatgcagctaagccaaaacagcatcagcccaagatattttccgataataatgttcaaacgggttgttttactgacgagaaaacggatggttttcaaatgaatttctcggctcaaaatatcgtgagacaataaaaaaataaggaagaaaccaaataacgacatcaccagttcattcccaatagaataaggatcctttgcctgctcccatttgtcttgatgagcagcaataaacggaagagttgaaacaaaagtagataaaatgaaaataataacaattgttaaaatcgattttgtgcttttgaagagctgcttaaactcattcatacagatggtccacacacgctgtacctcccttcatctttattataccgctagaaaggaaagacaccatatctcgctctttaacatttgtttaaattttataaaaagaagactcttccagcatcagttgactcacttttgaaaatgttcagaaaaatatcttgatttatcaaaaaacatcatgtatgatagctttaattcaagatagttaaacaggcaatgacgagagaaagtacaatcatcaatttttccacagagagcttcggcagctgaaaagaagcaaaaataatgattcgaaaaatggtctctgagcctcgtgctgaacatatctatgatattagtaggacacgacgagagttggtactcgttatcaaaaccacagtatatgagccagattggagctttgtacttgtagaggctgtttagcgcgagcaaacagtaaataaaggtggtaccacgagacaaatacctcgtccttatgattcaaagataaggatggggtattttttattgtccacttttttcatacaaatgttcaaatgttccacgtgaaacaccacatccattttttcaaatgaaagggagattgacatgagtgaacatgcattggttttacaatcagatttcggcattgatgatggagcagtcagcgcaatgtacggagtggcaaatacggtgagcagcaggatccgcctttttgatttaacacacaatataccgcagtatgacatttgggaggcatcttaccgcctgctccaaaccgtcacatactggccggaagagacggtattcgtttccgttgttgacccaggagttgggtcagaaagaaagagtcttgtcgtcaaaaccaccagctcgcactatatcattaccccagataacgggacactcacgcacgtcgcgcaggatattggcattgtggaagcccgttatttagatgaaaccattaaccggctgccgaagtcgggaaaatcacatacattccatgggagagacatttacgcgtatacaggggcgagaatcgcttcaggtgtgatttcttttgaagaggttgggccaaaggcgaatattgatgatattattcaccttccagtcgtacaggcgtatgcgaaagaagaagtcatcacaggaacgattgatattttagacgtgaggttcggaaacctatggacaaacattcatcacacgttatttgaacagctttcaattaattacggcgatgcaatagaagttaccattgccaacgggccgaaaaatgtgtataaaaatatcatgacctatggacgatcttttgccgatttaaaggtaggcgaaccactcgtatatgtcaattcactcgatcatttaggcgtggcgatcaatcaagggtcatttgcaaaggcttataacatcggtacaggcacaggctggcgcctttcgattcgcaaagctccgcgcattatatacgaataagaggaggaaacatcatggcaggtaaacaactttcaacgaaaactgtcgttgccatcggaattggcgcagccgtctttgtcattttaggacgcttcgtctccattccaactgggattccgaatacacaaattgagacatcgtacgcattccttgcattaatggctgtgctttttggtcctgttgcaggcgcactgattgggtttattggtcatctcattaaagatgccaccacattcggcccttggtggagctggattatcgtttcaggtgttgttgggttattgattggcttcatttctaaccgtttaaaagtagaagagggcgactttggctggaagaagatcacgcttttcaacgccgtacaagcaggtgcgcaggcattaggctggtttgtcattgctcctgtactcgacattgtgatctatgcagaacctgcgaacaaagtatttgttcaaggcatcgtggcagggatctcgaacatcatcacagtcggtgtactaggaaccatcatcattgcggcttatgcgaaaacgagaagcaaaagcggcagtctatcgaaagaaacatcatgaagcaaggtggaacacataaatgaagaaaccgatgattcaattcgaacatttcggattcaagtatcgcagtcaggcagaaccgacattgaaagatatcaacctgaccatctatgaaggggaaaaagtcctcatcgcaggcccgtctggatcgggaaaaagcacgctagcccattgtatcaatgggctagttcctgcgtcttataaaggttctatagaaggaagtcttcacatcggcgggaaaaatgcagagaaagagaacattttctccctttcacagctcgtcggaacggtgctgcaggaccctgatggacaatttatcgggctgaccgttggagaagacatcgcgtttgctcttgaaaatgatcaagtcacacgcgaagaaatgaaaacacgtgtcgaagaagcggcaagattaacagaggtagacggcaagctggcatcgtccgtgcatgagctgtcaggcggtcaaaaacaacgtgtcgccattgcgggcgtacttgtcaacgatgtcgacattttgctgtttgatgaaccacttgcaagccttgatccgtctacaggcaaagaagtgatcgatcttattgatcgactgcaaaaagaaacgaaaaaaacggtcgtgatggtcgagcaccggttagaggacgtcctcttccgtcatgtggaccgcatcatcgtcgtcaatgacggaacgattgcggcggatatgacaccagatgaattgctcgcctcaaatgtattagaagcggcatatttgcgcgagcctttatatgtaaaggccatgaaatatgcaggcattccaattacaccgggagatcagatagctaatttacagcatctcaccttaaatgacgaggaaaaagggaaaatcgagcagtggatggaagcgtctgagccgtcagtagagcagattgcagcgcaggatttactagaggtgcgtgagctgagctttgactatccgacaagaccaaacacgctgagcaacatctcctttaccgtcaaaaaaggagaaatgatcagcatcgcaggagccaatggcgcaggcaagacgacactatccaaggtgctctgcgcatttgaaaagccaacgaaagggacaattcatctgaatggcgatgacatcacaggagacacaatcaaacagcgttctgaacgaatcggcgttgtcatgcaaaacccaaatcaaatgatttcaaaacaaatgatctttgatgaagtcgcactcggtctcgttttaagaggcgtaaaggaagacgacatcaaagaacgggtggagcgggttctaaaagtatgcggcttatatccatttcggaactggccgatttcagccctcagcttcggacagaaaaaacgcgtcaccattgcatcaattcttgtattagagccagaaatcatcattttagatgagccaaccgcaggacaggattttaaacattacacagaaatgatgacgtttttagagcaattaaatcagcagggtgtcacgatcttcatgatcacccatgatatgcatttgatgctcgaatacacgacaagaaccattgtcatttcagatggagaaaaaatcgcagatgataccccagccaaagtgctgacagatcagctgcttgtccaaaaggcgagcttaaaggaaacgtcgctgtatgaactggcgctgaaagcagactggccgaatccaaatgaactcgtggatcgcttcattgaggttgacagaaaggaacgaatgacatggctgtagacatgctgtcctatatcgatcgcccgtcgccgattcatcggctgacaggtgcaaccaaactcatttgctttatcctctggtcatccgcagcgatgctcacgtatgatacaggcattttagtctttatgctagccgccagtatcgtattctttcagctatcgaacgtgcgatttcgtgatatttccttcgtggtgattgttctggcgattttcctagtcatcaacaacatcgccatttacgtctttgcgccccagcaaggagtcgccatctacggagcaaagcatgagctgtttcatattgcaggctggtacaacgtcacactggaacagcttttctatcaattgaatattacgctgaaatatgtgaccgtcatgccagcagcgcttttgtttatcgtcacaacgaatccaagtgaatttgcctcatcgctcagccgaatcggggtcagctaccggatttcctatgctgtcgcgattgccttacgctatattccagatattcagcgggattttcgaacaatagcgatttctcagcaagcaagaggaattgatttatcgaagaatgaaaaactggggaaacggattaaaaatgcgctgtcgattgtgatgccgctcattttctccagcttggagcggattgaaacgatcagcaatgcgatggagctgcgcggatttggaaagcataaaaagcgcacatggttcacggcgaaagactttcaaaaagcagattatgctgcgttattgtttgttggtgtggtactcatcgtgtcgctagtgattacatttgttagaggaacaagattttataatccatttttatagaaagaagccttcacagaagtggaggcttctttgtttggtttgtggataaaaggtgtgggaaatggcaaaagactattaacatgtgaataaatcggttatattgaacaatgagcgaaacacttgtgaataaccagacaacatattggaggaataagaaacttatgaacaaaacattatatgcttgtgcagaacacatagaaaccgtattagacatgtacatagatgatcacgaacagccaccagaattcagaaaaatcgaacatacacacagtttatccacaacctgtgaattgtgcgatgaacctgcaatatatatagtggggaacgaatgatcggacacaaaatacacaaattttatccacaattgttgataacttatatgaataacttgttcttaaggtggggatgacctgtgaatatatcaattatcacagtaggaaaattaaaagagaaatatttaaaacaaggcatagcggaatacacaaagcgattacaagcctatgcgaaaatcgacatcattgagctcgcagacgaaaaagcacccgaacacctcagcgatcaagacatgaaaatcatcaaagacaaagaaggcgaacgcatcctaagcaaaatcaacccagacgcccacgtcatcgccctcgccatcgaaggaaaaatgaaaagttccgaagaattagccgatacaatagataagctggcaacatacggaaaaagcaaggtatgtttcgtcataggcggatccctcggattaagcgacgccgtcatgcagcgtgcgaatgagaaactgtcgttttcgaaaatgacgttcccgcatcagttgatgagattggtgctggtggagcagatttatcgagcgtttcggattgtgcggggggagccttatcataagtgaatggggtttttgcgcataaatattagttaccatttaattttaaaaaaactaattaaacccaatctaaaaagggtgaacatggttcatccctttttaaaattaatcaaataattctaatgatggggttaaacagaactttaaatcattagtttcttttaacccaatttgatgattaatcattaaatcaactaattgattcccatcaataagtatgatccagcgttcttcactttttaattttgccttattcgtataactagaggtagtgacgaagtaagcaccagtgttatgtttttggctccatgctccaataaaatcccgaatatcttgttcacctactagattattttctaaatatcttttaatttgaacgagtatttctccttgtttgagtaaggttctatatagtagaccatcaataccatcatcgccactttttttagtaacttcaccgtagggtgcctcatttacttgtactaatacctgtattactaacgactcgaaattatagggattcatattcattagtaatgacttaagatattttcttaaatgaattgaatactcatcataagctttaattaacgaattgagtgcctcgtaatgtgtacttgcgaatggggcctctagtgattgcaactcccctgaagtttcctttggaagctgattattccaaaaatcattgatgtttgaatctggattaatcattaattccctaccgtaatctgttaatagaagtaaatctccgtttaactaacccctttaatatattaagctgaaaaagtaattaagttaataattacgttcattaaataactaattatggataaaaatattgaattttccattacgataagttatcatatatttgaagttaagtgattcttaagtcatgaataggaggttttatatataagaataaaaatttacacgtttataattagtataatagtgttagttttcttaattgttttttttgtatttaataacttaaacaatacgaataaagagagtgagaaagctaacttcagtgaagacataaaagtccaatggaatattaagttgcttgatccatatatgatgaacagtggaagaagcgaaggaagaactaaagttaaaatagctatcttagacagtggtattaatcaacaacatcaggatttaaaaggtattgttaaaaaggaatataatgctgttactccaaaaagacctgtcaccgatgattttggtcatggcactgccgtggcaggaatcattggagcaagacaatctaataaaggtataacaagttacaatcattcaggtgtggagctttatgatgttaaggttttaaatcaacaaggtaaaggagatgttgaatctttaataaagggtattgaatggagcataaaagaaggtgtacatataatcaatatcagttcaggtgtagttactaataaagctaaattaaagtcatccattgataaagcagtgtcacatggaataattatagtagctgcagcaggaaatacatatggaactggtgtagagtatccagcgaaatacacaaatgtgatatcagttaattctattaaaaaaaatcttaaaaggccaagctcagcggcaagaggaaagatagattatattgcaccaggagttgatatactctctactaatcataggggggaatatagtttgtttactggaacctcctttgcagccgcacatgttactggtgtaacttcactgtatgttcaggattacttgagtaaatctaagaagttaaatgttgatgaacttatgaaaaagttgaaacaagaatcccgaaaagttcaatctttaaatgatgatgagcaagggaacggattattaatctataatcataaaggagcctaaaatgaattataaaaaaataataactatattaatagtgactgcgatggtaattgtaaatttaccaataaatcaagccgaagcaattagtgaaagtaatgaagtaaataatcaattgttagaaaatcagtttgatgagattaagcaggaagtctatgatgaattaaatattgattatactgatgaattggatattaatttaattgacttagaagaagaatcacttcatattgaaactacctttaactcagaagatcttgaagttaagggtgaccttgaaatgagcttagaaacggaagaaatgaactttacgtcatctattattgatgaaaatggtaaacttattaacaaagaatatgacattgccgttgaagaggcggataatgaaacgtttaaagctaccttaacagataaagactctggtgaaaaatacactgttaattctgaagaaattgaggcttctattttaccagctattattttaggtgtgattatcagaacttctgctaagattgcttttaagatgtatacaagaagtcaaattttaagagctgttactgcagttacgtttaaatctgtgcagctacaaaagaaatttaaacatgctgttgattttggtgtaaaaggatcttatagcaaggcaaatgcaaaaaaatttgaaacagctctaagaaaccacgtaagtcgttcaagtcatgtatatagaacaaagcatagtggacaatcaggttacgttatgatgcatttaagggggaataaagctgcatttttcaagcagaacggtgaatttattactggttataagctctcaacgaaacaaaaaaataactatattagaatcggtgagttaatagttaagaggtgattaataatgggtataggtggatctgtaaatgttggtgttgtttttcgtgaaaatgatcatattcaaatgtttcagtctttcgtaaattccttaaaaaaaagggacgtgtcctttaaaaaagtaaagtatagtatagatacagatggagaaaattggattgaacaaagtataagtaaaaatatcatcgaagattcatatttgtctggtcactatacagaatttgaagtattaaatctattaaatagctctaaaccagtaagattaacaattcatatagaagatggatactttggtttcttactagattttaactgggaagaagtagcctctcaagaagtatttattcttcaaaatcaaatgctacagtttttaatcgaactttatcaggatctctcttatcatcatgcgttcattggccatgaaattgaagttgatgtccatccagatgactttgaaggtttcattggagaagctgattatccagttgggattattggtaaaggacatagattagctatttattatggttctgttggaatggatggtttatctgctcaaaaaaagagaacagaattagttaatttatagatcaagcaagcgtcattcaattctattgaatggcgctttatttatttaatggcgtaataaaaccatctaagaaaggttattataaaaaaattttgaaatatgtttagttgatattttgctgcttcatattaactacaatatggaattgagttacactggaaaagtatgttattatttaatattaaagactcaaagactattcaaaagtataattgtcgatatttaaatatgctcgataacaggagatatagcatgaataaaaaggaagatattctaaatgcatggattacaatagagcagttagcagaaggttcaattaataaaagtggcaaattattaaagacatttcatcgtattgaaaaagattggcaacaattctttatgaattttttatctcatcaaaaacaacaaaataatatgttagataaagcctttaaaaagtctggaatcgtattttactttggtattttcaatttccaagaagttgttgatattttgagagaaaaatataatattgagaaaacttatgaggaaataagtaattcggaaaaatttactttcgctttatattttgatcatcaactcaacctagtggctgataaattatttttaacaatgagcggttatatccgcgaacatggccatttacctgatgatttcttaaaagttgaaactttatttagagaagaattagatcgaaaatttgaagagggttttcataatgtgttttctgaacttatacaaaagtatcatgtgtcaatagataatttccgttataaattcatacgacatctggataatgaggatattaatctacattccttctttattgaagatttaaaaatggcaaagttaattgatactgaaaatataaacagatattttaacgggtttactggaaatagaagaaatctagacagtcataaagagtctgaacattttaacgcttatatttttgaggaaattgctttaaaaccaaaatattatccgttaggacgttttccatcaaaccctgattatgcactctattttatgcaacaagcagctgtcaatttagctttaaacgacaaaaacgatatccgaagtattaacggcccaccaggaacaggcaagacaacattgttgaaggatatttttgctgatttagtcgtacaacaggcactagctatttcaaatctttctaataaagtgattcaaggcagtctgacctattggcaaaatgctaaacttggcgttttaccacgatctatttctgataaaaatattattgtggcaagttcaaataatggagcagtccaaaatatcgttaatgaattaccggtgaaagaagagattccaaaatgttttcaagatcaattagagaaagcaaattatttcaaagatatttctaattctcaattaacaggagaaggatttgggaaagatcgatacattataagtgaactgctcaatgataaaaattggggtgttttttcattagaaggtggaaattcaatcaacatgaataaattgcttctcaatatagaggcaattgaaaaagatttagaggaagatgatcaatcgaatactggagtatatcaggaattcaaacggctttataataaattaaaagttgaaagagataaagtagaaaaatatagccaaaaattatataaaatacgaaaactaaatatcaattatataaatcaagttaaagaatttgaaaatgagaaaaaagaaaaacataaagttttgactagtaatgaaaaagaagcaaaagttgaattagagagacttagagaagaggaattaaaatttcaaaaagttttatctaatgtttctgttgaacttgaaaatttatcaagggcagaagtacaagctgaacgaaattatcatgttcttacttcacaaaagcctagttttttatggtttcagaaaatatttaataaatctaaagtcgaacattatttcaaaaagctaagcagcgtgaatgaacacttaaatgatctaactcaacaaaaaacaacacttacaaatgattatagacagcttgaaaatcatctagcgaaaaatgctgttaaaaaagagcatactcaaaaacaaatgatggaaagaaaatctacctttgaacgatgggtgaatgctaaggataatgatctgggaaaaatgaaaaaagaaattgatgcatttgaaaagaacaaatcacaaagtgaaattaaggaaatagacttttctctatcatacgaagaactccaaaagtctaatccttggtttacaaaggagtttcgtattttacaatcagaattatttatttcggcattaaaagtgagaaagcaattcctctctgagaatgtaagaaatttaagggcagcaaggattatctggaataaacaatcaaattacattgcgaaagagaatggccatgagttaatttcagaagcatggcaatggatcaatttcgctgtgccagttatcagtactacttttgcaagttttggtcgaatgtttaaaaacctcaaggaaaattcaataggcaacttattcattgacgaggctggtcaagcattaccgcaggctagtgtaggagcaatttttagaagtaaaaaagtaatggttgtaggggacccctcacaaataaagcctgtattaaatttagatccaaatgttttaactttgattggaagacactataatgtagacgaaaaatttgtatctgctaatgcatccactcaaacaatagtagatgatactagtcagtatggattccaaaaaaacgaagacgaatggattggtattccactgtgggtacatagacgttcaaactatccaatgttcacgatttctaatgaaatttcttatgatggtttaatggtacaaggtaaaaatgaagatgaggtgcaagggacatcagagtggcttcattgtgttggaaaggcgaatgacaaatatgttaaagaacaagctgagttactaaaaaaccaaattactaagcaattacaagcaaatacagatttagctgatgatatctatgtaatatctccctttagaaatgttgcttatcaaattacaagagttttagatgaaatttgctttactaaacgaaaagacggtaaaccaacaaatgtaggtactgttcatacttttcaaggaaaagaagcgaaaattgtctattttgtcctaggaacagattcaaatagcagtggagcagcaaaatgggctgtttcagagcccaatataatgaatgttgcggccactcgagctaaagaagaattttatattattggtgataagaaattgtatgcatctcttggaagtgacgttgcaaacaagactatttcaattattaatgactataataataagtgaatttcaaacttataacatatacgtacaactggcttgtaaccagctgcgtaagtagtacttcaatatacaatctaagaaagcaggcacaccatgcacacaatcaaaaaaataggccaaaccttctcctacatcacaccaatatcactcaccgaccgccccattctaggtatggttgtgggcagtaacaagacattaatgattgatgctggtaactcgaaagaacatgccaagtactttatcaaagaaacgttaaaacatgagaacttgactcctgatatggttgtcctcacgcattggcattgggatcatatctttggtctgccagcgctgcctgattcgctttcgattgcttctgtaaagacaagaagtgaaatggagaagctgcttccgttttcgtggtcagatgaggcgattgatgagcgggtgagggaaggaacggagattgagttctgtgcgaaggccatcaaggaagaatatcaggatcatcgagatattaaagtggttttaccggatgtgacatttgaccgtcggatggagatcgatcttggcggggtcacgtgtgtcgtgcaacttgttggaggcgatcatgccgcagattcagtcatcgtgtatgtgaaagaagagaaaatcctttttcttggtgattgcatttatccgaaaatgtatgccgaaaaagtacattatacgatgaaggaaacattgcgacttttaaatgaattagatggttttgatgctgatatgtatattccttcacatcaaagaccgtggacaaaagaggagtttcgtcaggaaacaaacaagcttaggatgattgcgaaatataccgatctttgtggtggagataagcagaaaatcacgatagaatatcaaaattacgtgaacagagaactgaaagaagatgaattagaaaccattgcttactttgtaaatggttattaaataattgctgaaactaaacaaaaaagtctcatttgagtgatttccctcaaacgagacttttttattttctatggcaaacctacaacatattctgcatcacaaactgtgacagacatttttcatagttcctctttttattcactgataacattactatacttatctagtgatgctttgcgtgggggaataccgattttccaagccattcttacttcccttattagctttagcaaaaggtgttgtagcagaattaaaaattagtatatgtgattaaacatatgaatctcagttcctatattcgattacacaccaaaaaagtcccctccacttaatttcgaggtggcttttttgggttaaacttaggcatttaaccaaatgtaaattgaagataacttctgatgtcatgttcagttggtagatgatcggaataagtcttatataatgatattgaagggtgtgaaaaacatgatcaatatgaatttgaaaaaaatgcgaaaaatacacaggtttacacaagaagaagtggctgagaaaattggtgtttcaaggcaagctgttgcgaaatgggaatcgggagaaactgtgccggatatcaacaattgtaaggctttggctgaaatatatggcgttgctttggatgatctcgtgaataatgtggatggtacagaagaggtaggggtgaaaccaaaaggaaaacacatatttggacttgtaaaggttggtgaacgcgggcaaattgtcattcctaaaaaagcgagggagatattcagcatcagtcctggagacagcctgttgattttgggcgatgaagctcaaggaatcgccattgtaaaaaatgaggccttcctgcagtttgctgacgatatatataaggcacaggaagatcaggaggatgaggaatgattgctattcaaacaaagaatctaactaagaaattcgaagaaaagattgcagtcgattctcttaatctttcaattgaacaaggcgagctttttactttacttggagtgaatggtgcaggtaaaacgacaacgatcaagatgttgacctgtcttagcatccctactaccggtgatgcaacgatccttggtaacagtattgtttctaatccctatgcagtaaaagaacagattaatgtttcaccacaggaaacggcaatagctcctaatttatccgttaaagaaaatcttgaattaatcgctcaaatatacggattccacaagaaaacggttgatataaaagtcgaggaaatgcttggtacgtttagtctgacggaggtatctaaaatgaaggctaaaaccttatctggaggaatgcaaagaagacttagtattgcaatggcactcattactgaccccaaaatcctttttcttgatgaacctactctcggtctcgatgtcatcgcaaggcgtgagctatggagtactattgagaaattaaaggggagcatgaccatcattctcacgacacattatatggaggaagcagcagccctttcggatcgaatagggacgatggcgaaaggaaaattaaaggcagttggaacagcagctgaattgatggaaagtaccaacaccaaatcacttgaggatgcctttatttcgttagctaccaatgaggaggtcaccagatgaagtcactagcctttgctgcacgtaatcgtaaagagattttgagagatcccttaaacttagcatttggtataggcttcccgttagttatcttatttttgcttcatgctattcaagcgaatgttccaactgatttatttgtcattgataaactaattcctggcatagccgtcttcgggctttcttttatctcactattctctggaatgttaatagctaaagatcgaagtacatcatttttgatgcgattgtttactacacctctttctgcctcagactacattgtagggtatattgtcccactcataccgatagcaattgttcaagttatcattagctttatcgcagcacttttcttaagattaccttttaattccaatgttttgttatccattcttgtccttttgccaacatctttactatttatcagcatagggctcttagtggggagtatatttaacgacaagcaggttggtggtatttgtggagcgctactaacgaatatgagcgcatggttaagtggtacatggttcgatttgaatttagttggaggctggttcaaagatattgcgtacgcacttccatttgctcacgcagtagacgctagcagagccgcactttctggagaatatgcatcaattttactgcatctttggtgggtaattggatatacaggtgttattgtagctatcgccatttttgcttttaaaaagaaaatgaatggggaaaacgcttagtttgatacagtttttggtgaagaaatttacagctgggttatctgggcctttttctgtatgataaactttaatgaagttgtcatttagtagagggaggtacatatgaaacagctttacatgaagcagaaagtatttagtctgagcggcaggtttacggtaaaggatcagcaggagaacgatgtgtatgtggtcgagggcagctttatgaagatgccgaagacgttcaccattctgaatacagaacgagaagaaatcgccgtgattacgaagaaaatgtttagctttttaccaaagtttttagtagaagttggtgggcaagaggtattgacgatcaaaaaagagtttacgttctttaaagcaaaatattcaattgatgctgctggtgtagaagtacaaggcaactggtgggatatgaatttccaagtgctgcagaacggcgaagtgatcggtcaggtgaagaaggaatggtttacttggggtgacagctataaggttgatattttgaaagaagagatggagcctgtgatgattgcactggttgttgcgattgattgtgtgaaggctgatgaggcagcgtctaggtcttcttcgtcggcaacgacgaattaaatatattcctaaaagaataatgaagaagagtgttagaacttcactcttcttcattaatcagtagatcgaattatgtttctttacttttcaatgggatacttctgaccatttttcattaatttttcttcaattatttctttcacatttagattaaggtctgaacaaaacattattgaatatattaagatatctgctatttcttctttgatattttcttcgttcgcctcaagagcttcttcattacttttccattggaagtcttcaagcaattcagctgcttctatcgaaattgagatggccaagtcttttggattatgatattgtctccagtttcgatcatctcgaaattggttaatcgaatgtattaaatctttaatctcagtcatatttgcctccctcttttaactcttgtaatttccttctcaatttttcatctgttgcataaatataaagtccatgaatgcctcgcttcatcagaacgttaatcgagtttagtataatcttttcttttgcctgtttaatttcctctgaagtcatgtcacttcttgatgtgaatgcacctgtatctttataatttgacgtatctattagaagttcattcttttcttcatcatagctgatagaaggaccaagtatgacgccgacataatttaaatcaaatccttgaaccgtatagattgagcccacttctctaattgaatctgcatgttcagcccatgtccatttatcatttgtaaaattccatggcatattgataccgccttcatctacgatataggcagctccatcttttttatgtaaaaagtcaaatgtagatacaatgcgggataagccgacttcatcatccttttcttgaattgccgttttaaattgattaggatcctcaaaaattttaagctcgaatgaagcttgttttactttaggtggatgtaataattgctttgagacaaattggtcaatccatttcaacgtatcagtatcagcatgcatacgcatctgttctgtgagtttcacagtcttcgcatgatatctgtttgtaatttcctcaagtaatttttcattccagtagcttttaattttgagtacctgctttggatcaaaaatgacaatggtcattttacttcgtttgataatctcctctagttggttttgataatggaagttattgtacttatcatcttttgttaataaaaggtgcgcttcatcaattaaaacgatgtcagccatttcacctgagtttgtcatctgattgataaacgatgttggtctcatgatttgtttcttcttcagatttggcagactcttggcgatgttttgatatgttttaagcatttctgcatgatttacaagtaaaaaattgttctttttgtttaagacagaatccatatcatttgataaatcttgaattgtattaaagagggaactcagtaaaacactctttccagtacctgcatcaccctctatcgaaataacatgatgccccgactgtttgatatgctctttacaaaaagacaaaatttcattcttaatttctacttgttgggatgacaattccttataaggagaaagcttataaatgtctctatttcttaatgtttcaattgagttagtgacgattttttcttgttgaagctgtttccacacctcttcaaagacatcttcattgtaaaagtctttctgataataatggtgcatttcccttgatcgtgtctgactaacattttttaattgaaaacgattttctgcaataaagtagtttatgagatttgtctcaatattgtaagaggcggattggtgaaagcgttcatgtccaattaaaattgttttatttaatttgttcttttttgggtctttcaaatgatctttcaaacgtctgctggcttggactgactgaccaatataagcagagggttttttcttttcatcatataggatgtagacaatgggttgattatggaataccgttgttcgtaaagaaagaatttgatctgttttaaaatcgcgtttttcaataaaaagttcactcatatagctagcccctgtagtctttttgcctattatcgtatcataaatttagcaaaatatctcagtggttataagtgaatattgaattcctgacatgatgagttatttttcattaaagagcagctcgaaatggttcaacagttattgaattaatttcaatagtggaaagccactaaaatccaaaaaatatctagcagtatattttccgagttataatatggatcatgcgaggtgagcaaactgatcacattccaatacaaagtatttctaacagtcgtcgaatccggcagttttacaaaagccgaggagaaacttgggctgacacagtctggcgtgagtcataacattgtgaagctcgtatccgaattagggattgtattgctgcggcggaatcgaaacggtctttcattaactgatgaggtgagcgggtaatgcctcatattcggcaaaacattcatcatgcgacatttcttcatacgacaaaaaagcttcctgattgtctcaggaagctttttccatccatcacccataataattattcgcttgaataaaaaattgggactgcatgtagttataagtgattttcgagaagtcgaaaggctggccgtttgtgagatgaaagacggtctcgacgcggagagcgggatcatcttgtttaaggccgaggtgctttgcttcggtttcattcagttttcctacttgtaagtacatatcggaaaagccgaccttgagtccaaggccttcactgataaatttaaaaacagaatcggcagcaatttctgtgttgagatagggaatgatggtttttcggtaataggattcttctagacataaggtttgtccattgatataacggatgcgtttgaggtaaaaaacatcctcatcttgtgcaatattcaaattaagcgcagcttcttcggacggtttgatggtgtctagcattaaaacctctgaagtcagttgaaattcctctaaatcttttttaaacccttggttggataaaaggctgatgtagcctttgcgcctgtgtcttcgaacaaagatgccgctgcccctcacttgatagataattccttttctttcgagtaagtctaatgatttgataatggtgcttttgctcacagcaaattggttcatgagggtttcgagtacaggaagcttgtccccttgctgcagctcatgggtgacaatatatttttcaatatcgctcgcaatttgttgatactttaacatagccattcctctttgttttcacgatttattgtctttgtattatagcacataccgattttcctttgatatgctaatcaaaattatatatgtattgatatattgtaccggtataattataatatacatatactagtagtgataaaggggggggttatatgtcaaaagtgagggattatcaaaagcttgcagaagacatcttagaggcagttggcggagaagaaaatgtggtgagtgccgcaagatgcgccacgcgtctgcgtttggtactgaaacgttcgaatccaaaggccaaggaagcagtcaacgccatgcctggtgttattaccgtggtggaaaacggcggtcaatttcaggtcgtcatcggccagcatgttggtgaagtatacgagcatttttccaaccttgttcagctccaatcgtcggatgatgaccagcctaatgaaaacaagggaacggtactgaaccgtgtcattgcgaccatgtccgctgtgtttgcgccttttgtgtatattttggctgcagctggtattttacaaggtgcacttatcctcattaatttgttatttccaagcttttcgaaaatgggaacatatgaagtctttagtttcatttcatgggcaccgtttacgtttttgccaatctttattgctatcacagcagctaagcattttaaaacgaatatgtatatcgcagtagcgtgtacagcagcgcttgtcagtccagcttggacagaaattgctgggcgtgtggcttcaggtgaaggcgttacctttttaggcattgcgttatctgaaactgtttatacgtcatctgttttgcctccgctgttcctggtatggattctttcatatgtagagagatttttaaataaacggattcacgaggtagtaaaaccgttatttgtaccatttatctgtatggtcgttatggttccgttaaccattctattaattggtcctctttcaacagcaggtgcaaatgggattgcaaacggatacaatatcttagcagaaaatgtaccggctttagcaggcgccattatcggtgggttctggcaagtgcttgtcatattcggcgttcactggggcattacgccaatggtgctcgccaactttgaacaatatggacgtgactccttccaggcatatcaaaccattgctgttatcgctcaggtcggcgcagtgttaggagttattttaaaagcaagaaaccgcgaaactcggaaagtcggagtctcagccggaatcacgggactcttcggaattacggagcctgcgatttacggtgttaccttacgttttaaaaagccgtttattttcggatgtatttctggagcagccggtgccatcgttgccagcttcttcacgccttattactttgcgtatgcaggtttgcctggtccgctgacaattgtgaacggaattagtgcagattatccaacatcgatcatcggtatcttaattggtgtcgcaattgcgatgatcttaccagttgtgctcattcaaatgtttggttatggggaagatacagtggagcagacagccggaacaacaactgtcaaagatcaagataaagaaaaaaagaatgcttcgatgaacaatgaagaaacaatcactgcaccacttgcaggaaaagtgctcacattatctgaagtaccggatgccgtatttagctccggggcgatgggcaaaggctttgccattgaaccgacagacaataagctgtatgcaccgtttgacggcagtgtcatcatgcttgcaccaacaaagcatgccgttggacttcgttcagaatttggtgtggagttacttgttcacgtaggaattgatacggtttctctagatggctcagcatttacactcaaaattcaagaaggcgacaaggtgaaaaagggtgacttgttgatgacatttgatcaagaagccattgaaagcaaaggattaaaaacagtcacaccggtcatcatcaccaatacacaagcgtacgaagatgtgatcgtagaagaacaatcgacatgtcagccaacggacgtcatgattacaattgtaaaataggaggaataaataatgacattatcaaaaggttttctatggggcggagcattagctgcacatcaattcgaaggtggatggaatgaaggaggaaaaggcccaagtgttgtggatgtaatgacagctggtgctcacggagtaccgagacaaattactgagacgatagaagacaacaaattttatccgaaccatgaagcgatcgatttctaccatcgttacaaggaagatatcgcgatgtttgccgaaatgggtttgaaatgcctgcgtacatccatcggctggagccgaattttcccaaagggagatgaagctgaaccgaatgaagctggtttacaattctatgatgatgtatttgatgaactgctcaagcatggcatcgagcctgtgattacactgtctcactttgagatgccgcttcatttggcaagagaatacggcgggttccgaagccgaaaagtcgctgagtatttcgcgaaattcgcagaagtgtgcttcaatcgatacaaggacaaagtcacatactggatgacatttaatgaaatcaataacaaaatggatgtcaacaacccactgttcctttggacaaattcaggggtatcagtcaaagaaggcgaaaatgccaaagaaatcatgtatcaagcaggacatcatgaattacttgcaagtgcgtgggcagtagcaaaaggcaaagaaatcaatcctgcttttcaaattggagcaatggtttctcacgtaccaatctatccatattcctcaaatccagaggatgtcatgcttgctgaagagtatatgagacaacgctatttcttcccagatgtacaagttcggggctactatccgaactatgcacttaaagaattcgaacgcaaaggctatcatattccgtttgaagaaggcgatgaagaaagcttaagaaaagggaaagtagattatcttggctttagctactacatgtcgacaacggttaaaagtgatgcagtgtctgataacaacggagatattgtcaacggagccctgccgcatggtgtagacaatccttatatcaaatcaagcgactggggctggtccattgacccgacaggcctaagatatactttgaatcgtttttatgatcgctatcaaatcccgctattcattgtagaaaatggatttggtgccatagatcaagtggaagatgacggttctattcacgatccagaacgtattcaatatctcgcttctcatatcgaagcactgaaaaaagccattgaatacgacggtgttgaccttattggctacacaccttggggcatcattgatatcgtgtcattcacaacaggtgaaatgaaaaaacgctacggcatgatctacgttgaccgcgacaatgaaggcaacggctcgatgaagagactcaaaaaagattcttttacttggtaccaaaacgtcattgccacgaacggtgaagaagtgtaacaaaggaaaagagaagcccggatgagcgaagtatgtgcttgttcgggtttttcatcgtttatgttttaatagggcctgaatacaaagaaaaaagagagtaatggcgacaaaatagttcattggattgtgaaagatcttgatgttcaaggatatttgaagaagaatccaaaggccgaatatcaccataactgcaggaatgattcttttatacacattgattttcctttcgggagtggtttgtttttagttagcattgtctcatatcattgcagaggttgaaaagagataaagatattaataggttctattacatgatttggtataattgatctataaaaacgataaatggtagataaagtataggagttgttgaaatgaatcaaacactgcaaatgggagccaataccgtactaagttctccaaaggggcatgtatccatcagctatggagtgtcatctgcaattgatatttctttaacggcgtttcttttaacagattcagatcaggttgaaggagatcatggcattattttttacaatcaaccagagagtgcttcgggtgcagcgtcacttttaccagcagaggtatcaggtcagttgaaaaggcatcaattgaattttgatatgagcaaagtgcctgctggaatcacaaagatggctattacattaacagaagatcaaggaacgggcttttctcaagtgaagaatttgcaagcagaaattcgaacaggtgacgaggtgttttatctaacaccagtaaactttacaaatgaaaagggcattgtcgtagtagagctatatataagaaatggtgacacgaaagcacgctcaatttggcgtggtttcgattctggactggaaggtctatgcaagctttatggtgtggaggttgaacctgatgaacaggatatttctacacatcaaatggctcttgaaaaacaaccaattaaagaccctgctcaaacgaagacaactgctaaagagaaagtcgctgcacctatcagtttagagaaagttcagggtaaaattagtctagacaaaggtcataaaccgatcataatcgagaaaacgcctgagatcacagctacagtatcttgggagtccggcaccgattatgatatttatgcattggtctacacaaagtcaggaaagcaagtagatgtggctatgtttggtgcgaaaggaattcctgctctcaaaagttacggcagcggagctgttgagcatatgggagatgtcggtagagaccatgaatcaatgaaaacagaagttattaaactacggttaaatgacgatatccttgctgtcgttccggttgtttattctgcccaatcaaacggaacaggttccttttatagatatagagtatctatgagtatcgataatcaccaaggaacgtctgtgacgattcatgccaaacatgccaatgacaatgatcgtatttattcttgtgtgccaggtatacttcaaaatacaaatgatggtgtgatcatccgcccacttgagctttacagcaaaccaaactctgagcgcagacctaaattaaaattgaagtcttctaatgaaattgaggttttgatggataaaggacctgtcaatgattataaataaaacgaatgtatggctagacattgtctagcttattttttagcccgttaaatagtgagtctattccattttttatgtcaattagcctatttttccgttttggtggacacggtaaaatagactttatgatcaataatggagggagtgacttcttctgggcaagatacttgatacaaaagcactaacaagtgccacggacacaagggcaaaacactatcaggaactccgtgaacaaatggtagatttaaaaaaggcactacaaggtgtggcaaatctcggtgatgatttcactggaaaaggcgccgacaacattaaaagcttttataaagagctggctggaaatgtagacatgtttatcagcttcattgataagcaaaaagcctttcatgaaggtgtttctgggacactcgatgatacaaactttggcggcgatacctttgtagaagaacattttttagacaacgcagtacatatgggcatcaaaaacgccaaaagcattgtaaaggatcaaaaaaaggcacttaaaaccatttttcaggacattgatgacctcatttctctagaggtatttgacagcaaaacctttgatgaaaaaattgcaaatgcagaagatgaacgaaaaaagacagtaaaagacctaatagagcttgatcaaaatttaaaagatgaatatgctttgtcagagacggagcagcaggctacattggcattgtacgcagaaatgatgaatgccacaaatgacggaaaagcgatttcgcctatgaattttgacaagaaagcgtatcaaaatagcgaaatctacaaggcaaaaagcgatattgagaagcaaacttctgaatatctcaaaatcaaaaaagaacaagaagaagcccgcgagatcgcaaaggaacaagaagccctcgccagccgcccttggtatgaaaaagcactcgactatggcggaaatatcgtgaatgaactgactggcgtgaacgatgcaaaacgcgccgcaacaggcgttgatccaatcacaggggaagaactcaccgcaggacagcgagtcgccgcaggcggcatggcagcggcaggttatatcccaatcgtcggctgggcaggacgcattttcaaaggtgggaaagccgtttataaaacgactcaagccacctcagccgcaatacgagcagtcgacatctacaagacctcgcaaaaatcctttgatgccttaaaaacatcccaaaaaggcttatatggtctcaccgcaacaaacggcttcagtgaagcgactactgggcgagacatgtttggaaataaggtctcgaaagaacagcaggaagcgagtatgaatgcggcacttggaatgcttttgccgtttggtaaaaagagtatcaatggtagtgtggggattggtgaacaaaaagttgctgagaaagtaatagcagaaagaaccaagggattagatttaaggaagcaccctatacaaagaaagcagttaagcgctaagaagatgaaagagctgaaagaaaaatttgagaataggacgattacgaaattagaatatgaaaattataaatggaataaaaagtttgctaaacatagaaacacgggtgtgaatgagttttggtatcaggaacgtcaaaggatattgaataaagaggatccaaccaggaactgggataagcagcaattaaatgatattctaaatggtaagaagcctaaagtagatggaaaaactgtgcaagggcaccattcttatagtgcatcacaatatccacatttagcgaacaaaggtgaaattatatatccagctacaccaaatgaacattttaatggttggcatggaggtaattggaagaacagtctgcctggagaaagaattaaacctattgacgatttctaatctatggaggagaaactaaatgcctaaaatgaaaatgcgaatagaaaaagatgatgaacaaatcaaatatatcacgattctaagaaaacatacggataaaagtatttctgaaataaaagaagtaatggataaaaatgattttattttatcttataatctattagatattgatgaattgaaagagatgaaaaacattataagtttactagaaaaagctggagctaaaatgcatatttatgaagataatcgagaggttagtgtcgaatttttagataatcttattgaatcttatttagatacagaaagatatctagaagaggttgatgagcaaataaatgaagattaaattttgaggcttttgaaacagatgacgagttggaccgaagtataaatgatgcaatgcgtaaaataggaggtgtttggtgttaaaagatcatcagccagttgttcaagattttttctcttttttgaagaatgatttacttgaggtattagagtgtttatctaatagagaaccatggcaagatcatataatagggtatgaacttccagagcattcagaggatattgaatttaatactggggtaatgatatttatgaacacggcgtcttatcatgaaatcataatggacactccagatttctatagtgcttggaagagatttgtatggagtatgttgctgaaattccagaacagaagactcaagtttatttacttatggaaaaggtaaagactattctaaatttgtaaaaaacttttactaactgagtaaacctgctatgagattaaagttaatttatctaattagctccgaaaagcacttagttgttttattaagcaacaagtgcttttttgttataaacaagaaattggaagatgtacagtataccaactatataaaaaataagaaaaccaagaaggtgatcccgtatgagtgataaccaaaaaccaaaaatcgaaaccttaaaaagaaaaagcagaagaaaacacttaatgaacgaattaagctaaatgacactgccagaaaatccatttttagatatagaagaaaatcaattatattgtcagaaggtatttactttccttcaatcgagagaagataaaattcaaatacacggaaaccactatcgagagcatattgagaagtctacacacatgttaaaggaaatggtcagccaggtgaaagtaactcctacacaaggtagattaatattttttcgagagcatgaaattgaagcggttttattgaacttgaatgaagttttcagccatttaagccagcttcttgagcaaacgaaatttttaagtggatacggagattttattttagtcgcagaggatttttgttttggtttatgcatagagagaacggaatattattacgagtttagtacgtgggggctaatatcatgaatttatttatgatgcctccaaaacgacaatgattaaaaactatatccattattaataatccctttgcatttcccagggaatattcgctacagcattcccctcaaatttaagcaattcactatcattacctttcacattcatataaaataagagagtgaaaaattgaagaaatgcttgatacatgaagggcatgtaagctgtgagctgcatgacatgatgagatgtatgaacgtgaaggctgcaaagctgttcttcctcacatatgagatcttgtaagcgtaaccattatttgtcacttcattgcgatggtgttgaggggtgtgtcaggatgagaaatccgtatgtgagaacggcttctagtctttatatcaattattttttattaggtatggtcaatattattttggcttcaaatatgccatttttaatcaaacagttagataccaatagtgcgggaattagttatatgatttcggcgctcggcattggcagggtgctcacgtatggtctatcgggcgtgctgtcagatcgttttgggcgaaagccggtcattttggtttcgggtgtgctgatggcggcgtttctcatcggaatcccattgtctccgaattatcaaattgcgtttgcgtttgcgattttggcaggggtggcgaattcggcgatggatgcaggaacgtatccagcgttaatggaggcttttcctcaaaactcgggatctgcgaatgtgatggtgaaggcctttatctcgattggggcaacaattttgccactggcgattttctttttagcagagcatgatttgttttatggaatggcattttttgttcctgctctgatctatcttgtgaatgtcttgatgctgtggagcttgccatttccgaatcatcgcaaggtggagcaagtccaggtaacggagcatgacggacttccgcgcttctcgacagagcctacgttttggagagaagggattgcactcattgtgatcagctttacgtcaaatgggctgtatgcgttgccgcaaatttggctgcctacttacggtgagaccatattggggatggcttcagggagtgctgtgaagctgcttagttactatagcatgggcgggctgctgtctgtcttattgctcgcatttcttttgcgacgttttgtccgtccagtcactgtgctgctgatctatccaatcattacacttgtctccatctgtgtcctattggtcgtgaaatccccagtcatcggaactgtcaatgcctttgtattgggattctcaacagccggtgtttttcagctgacgttaacggtgatggctgaattcttctggaagaacaaaggaacgatgacagggattatctccacagccggcggggtgtcggctattgtcattccggtcgtaacaggtttaattgaaagtcactcgaccattttacaaatctttctgttcgatgcggtggtggcagttgtcgctattatcggtgcactgtatattctgtatcgataccgccaaatcatggtccatgaataaaaaagacgacctccgctcaggaagtcgtctttcttttgtttagaaacggtcattttcaaaaagaatttgtttcacttgatcaactggcatatcttcaccagtaaagagtttgtaagcaagtgcaccttgccatagcatcatgccaagaccgttaatggttttggcaccagcttcctgtgcttgcgcaaggagctttgttttttgcgggttatatacgacgtctgtcacgattaaatcttcacgcaggacatcaagtgtatcatcgatgatgctgagctgatctagtggtttcatgccaaggcttgtcccatttgctaagattgcactttcagctacttcacggcggaaagcgtctttgtcttcaagtgggaaaatgttcgctttgacaccaaatgatgtcatttcgttgttgatgtaatttacattttcttctgcttgaacaaagtattgatcattacgagcaaaaatactaatttcacgaatacctgattgtgcaagctgaatggcaatcggtgttgcagctccgccagatccgactagtgtgaccttttgaccagctaattcaacgccatgttcaatcaagtttctcacgtaaccaagaccatctgtgttgtagccaatcagtttgccatctttgtttacgacggtgttacttgcacgtgtgtattttgcagaatcatctagttcatctaagtagtctagcactttcattttgttcggcatagaaacattaaacccagctgcacccattgctttcataccgttgacagctgcttctagttcctcattccctacttcaaatgcgaggtaagcgtagttgatccctgttagtgtatagccaaggttatgcatacgtggtgacaggctgtgtccgattggtgtagcaagaaggcctactaatttggtttttccatcaatattacgttcatgtatgtttgtcatgattgacatctcctttaattatctaaacaattttttcatgcgtccaagaacaaagaccgctaacaatacgctaataaccgcaatgatcatatcgaaaaataacgtcattttaatatcgtacgtgctgaccaacccgcttgtaatgagcggcacaagaataaacgctgagcttgccgcaatgttgacgtatgatgaagccgttgctttgtttgtagggaataatttcatcataatactcatcgccagctggaagatccctgctgtaaataatcctaagaaaaaggtgctgacaatgacaatgctatacgtttcaatttgaaatagtgaaagcatggcaagaaatgctccaactggataaatgattgcgaccataatcggcgaaatgaatttatctaatacaattgagagcagtagaactgacacaagggcaccaatactaaaataagaaagaagctgtgtcgcttgtcctgcaccaagcccaatcaatttcaatccgagctgtggaagccacgtttgccatacgacaaacaatgcagtagacgtgaatcccatgagcacgacggctaagccttcacccaacattttaggttcttccttcatttgttcctgcactggaaggtcatcttgtgaagagacttgcttatggttcgggaacggcataaagatcaagtaaatccctacaagtaaataaagaagtcctagtccaaagaacgcccagccccagaagatgtcatgtgcaataaggaacgccaagataaatggaagaacagtcgctccaattgaaacggacgccttcactaaaacagaagctgaacttgcctttttaggaaacgattctgtcaaagcaggatatgttcccgaatcaagtaatgagtttgcaatcccggctgaaatcgcaaagataaatgccaatgtataattcgttgtcgttggaataccgattaagaataataagtaaagaaagttccctgtaataatgacaggcttacgtccccagcggtctgctaaccggccagagaaaaagagagcaatcagtttaccaattccgatcgccgatacaagcaagctgattttcgtaatatctacatggtagcgttcagataagctattcatattggacgctacaatgatattgatcatgccgagcatgaagtaatttaaatacatgccgagtgatgatttaatataaggatttttcatgttcccactcctatatttgcaacccttttagggttaaattctttgtatgtcggttgttctttctatgaatgtacataaagcccatcacaacaccccttatgtgattgatgtaaaataatgaatattcatctgttcttcaattaagtacatcgttctactaaaatataaaaataaaaacagccttgataagaaagtgaatcttcataatttgatcagaatcagaaaagaccacttttaactgatgttgaataaaaacaacgatacacagaaataggtataacgatatactaaaagaagcaacgagataaatatactcctgtgtttaaaatgtgtcaagtttatgactttgtgatttaaaaaaagaaaaatgaaacaaagaaatgattgacttgctcaataaaaaaggagaattgctgtacacaattctccttcacaatgaggtagaggtttctctgatatgaagttgaggctttaagatcaatcgctgcagctcttcatcctgctcgttcattttatgatataaaaggttcgctgcttttaccccgatggaccgtgggaatgaagagacagtggtgagcggcgggtgatacatttccgcttcagggatgttatcgaatccaactacatcgatatcttcaccaggcttgatgtcacgtgatgacagtccttgaatgactccaaacgcaactaagtcactaaaacaaaaaatagcagtaggaggatcgggctgatcgatgacttgggcgagtgcttctttcccgccttcacgagtcggttccatatcaataataagagattcatcaattgttaggtttgcctcgtcgtgggctcttttgaaccctttcattcggtcgatccaagtcgaggaggtcttgatgccgcctaaaaaggcaatgcgccgatgtcccttttgaagaagatgatggaccgccatccaagcgccttgttcataatcagcaccgacatagtcacaatgcacatccgctaattcacgatttgccagtacttttggggtacgaatttgatttaattgtttgaccgtccgagcagagcttttcgaagctgggtttaaaatgatcccgccaactcggtgctctaccatggtagaaatgagccgttcctgcttatcgacactgtcaaaggttgtcccaagtaaaacggtatagcccagtgattcaagtgtggtttgcacgccgattaaaaactcagaaataaacgtgtttgaaatatccgtgacaatcacacctacaatatttgaactttttgaccgcatgttagcagcgacgcggtcatacacgtatcctaattcctccatagattgcaggactttttttcgagtggcttcagagattcttgggttgtttcgaacaacgagtgaggccgttgaagtcgatacaccggcatgacgggcgacttcctgtaatgtgatacgctgtttgttcatttttttcatttatcttcaccaacttcaatggattgcctaacttgcttcatggtcaggatggatttctccatcaaacgagccgaacatcttttgatttattataccttaatgaggggtattgatgaagtgaagtcagctagagtgacagaaatcataaaagatttccattgacagctttcttctagaggcgtaaaatatgaaattattcagaaatagcaacattttaagtaaataacgaaggctatgattgctgtgggtcacactatggcaggagcagcttctggagagaccgcatgtatgtgcggcgccgaagggttcacaatctcaggcaaaaggacagaagagtacgaaatattgtatttgtaatgcatggatgacgccgtgtattgcttttctctattttgctattcttttatgaccgtgagattggagcgcatccaatctctttttttatggactttttgagggttcattatttcagtataagatcgtgtcgtaggagggcgttagcattggcacaacaagaattaaaacgagatttatcaaaccgccatgttcagttgattgcaattggcggaaccattggaactgggctgtttttaggctctggaaaggccattcaattggcaggtccatcgatcatttttgcttatttaattgtcggaatggcgatcttttttgtcatgagggcacttggtgaattactcttatcgaaggcgggctatcagtcattaaccgatattgcagaggactatctcggtccttgggcttcctttgtgacagggtggacatattggttttgctggattatgacagcgatggcggatgtcattgctgtcggagtgtatgtgcagtactggtttgacatcccgcaatggattcctgccatcatttgtttgttgattttactagggtttaatttattaacggtgaagcttttcggagaaatggaattttggtttgcgttgattaaggtcattacgattctattactgatcggcgttggaattgtccttttaatcatgggttttcaaacagatgcaggtccggtgacggtaacgaatctttggtcacacggcggattattcccgcatggtgtcacaggcttcttactgtcattccagatggtaatctttgcgtatgtgggagtggaactagtcggtgtgtccgcagcagaaacagccaatccgcaaaaaaacatcccgtctgcgattaataaaattcctttaagaattctatttttctatgtgggtgccatctttgttttactatgtatcaacccatggactgagctcagtgcatcagaaagtccttttgtaaaaacatttgggctgattgggataccagtagcagcgggacttattaattttgttgtcttaacgtctgcggcttcagcttgtaatagcggtatgttctcaacaagccgtattttatataatctcagtcatcaaaaacagggaccagcttcctttggacgtctgaacaagcacgctgttccaagtaatgcactattcgtttcaacgattgtggtatcggtcggtgctcttttaagcaagctgattcccgaacaagcctttggtattgtcacaaccatcagcgccatttgtttcatttgggtatggagtattattttaatttgccatttgaaatataaaaaaacacggcctgaactgcatgcggcatctacttttaaagcaccgttcacaccttttgtgaacatttgtgttcttgtgctctttgctgccattcttgtgatcatgctgtttgcggatgcaacacgtccggcgctcttattaacaccggtttggtttggtttcttattattgatttatgcacgaaagaaacgccgtgcgtcataatggacggaaaaaagcacagcctttgcattaggctgtgcttttgttcatttaacgatttctaatcctgaacatataatttgcattcaaaatgattaaaacaagtccaatcaccatgattgagaagagctgagagtgattggccccaagggaatacacaatcaaaataaacatggcaccgatcaacaggatattcatcaattgatatgtgtgaaacagtccgccaagcatcacatgcttttcaccttcgtcagaaatagcgagcagctttttactataatctttgtcagatgggcttggtaggttgcgattagggtagacaagctttagaacggatatcgctacataagaactgataatggtgacgataaataaagtaacattgaccagaatcagccagagtggctgctcggtgacgatcgcgataccgatggcaacaatggacaaaatggtacttaccgtattggctaaagtcaaatcagtaaaggtccgatattgttttgcttccagttcatcctcctcatcgccagataccgaaagtgatactctttttttcatacgtgaaacccctgaaaaacaataaataatcaatagaatcgtcaatccgctgatgacaagagtcgcttcgaatgcaacatcaagaagtgtcatctcaaattcggctgccagcagacagtaagcgccgagaaagccaaggagagcacctaagagcattttgtatacagttttcatgtgagttcatcctcctcgaatagaaaaatacgttcaatgggttcctgaaaaattcgtgaaagcttaacagcgagcaagagagacggcattaattcatctcgttccattaagctgatggtctgacgagaaacctttgcacgctttgcaagctcagtttggttcaacccatcacgcgcacgaagctcttttagccgatttttcattctgtcacctcaactttgatcgaaatctttctttgattgtaaagcattgtattcaatttgacaagtatagttgtcaaattgataaaaataattgtcagaaagatcatctttaatcaaaaggtgaaccatgatacgctaaaggaaaaagaaacagaaaacaggtgatgtccgtgttcattgaccaattaaaaaatgacttacatcaatcacaaccgttatttattggagaagagacagcgttcaaagctgcggtccttgtccctttggtgcaagtaaacggggaatggcatatattatttgaggtgcgatcgctgatcatgagaaaacagccgggagatattagcttccctggtggcaaactcgacggcagcgaaacagcacaggaagctgcactgcgagaaacacatgaagagctgggtattccaccagaatcggtggagattcttggacagctcagtccttacattgcttctccatccttcgtggtctacccatatgtcgggatcattgataaacaaaaagtgaaacactccttcaatcaagaagaagtagaagagacctttaccgtgcctctatcatggctcagccaatatgagccgtacttacatcatgtacccgttcagccaacaccagctgaggatttcccttatgaaaaaatcatgaatggtgagaagtaccgctgggggagccgatcgatagaggaatggttttatgattatgaaaactacaccatttggggattaacagcccgcatattaaagcattttgtgaccgttgcaaaaagaaattcctagagattcgctctctaggaatttgttgttttcagccgttctttcgctgtttgttttcctttaccaattggaataggagctctcgcttggctcagtccgtaggaaggcatgttcatatagacggattcatacgagccggcttgaatttgataggtttcatgataaatgcccactgcgtcattgttctgagccctctgatgaaagttcttccaagccgccaaatgtttttccatcttcgcataggcaaggaggtcatctgttgatttccaatattggatcatcgctgtcgtgcgtaagccaaagtaattctctgtcccgaggaaaccaagctcatcttgatgggtatacagctctttgatcatgccaggcatcgccatgaacacaggcagccattgatgaaccgcccagcgtttgttgatccgcatgccgatgatgaacacaacaatcgagtcagaattttctgttgtaaacctgccagcacgtatgtcttttttcattcatttacccttcctttttcatcaaatgggatgtttccacgcaccaatcaattcctgcttgagccactctttttccgtaatctaaagtaaacagccaatacttcgcatccgcttcatctggataaagctcttgaatgttttcttcaatcgaaacataggtcttataacggatacgaagctgcctttcataatcctgtagaagcaccagctttttctcaaacgaaagatattgaccgaagaataactttaataacacttcatttcgttctgttggtaactgatcgagcggctgcgctaaccactgccttaacgtcttcagccctttttcagtcaaatgatattcccgcttgtctgagcgaccagacgtagaagcgggtgaaacctcagcaagaccttcctcgactataaactttaaagctggataaatttgtccataactaattttccaaaaatgatgcaagctcttatcaattaattgcttcacttcgtaccctgacttacaatctgtcgttaaaatacctaaaattgcatacgtcgtatcattgtattttttcatatcagcacacctatctaaaagatatatcaattagatatataataaatttgaaatgaataaaaagcaagaaaataataattgatagatttatatttttgaaatacaggagataaatcataaatatggtaatatatacttgatgtgtaaagtacttgcgcatctattcataaaagaatggagggtgtacaaatgaagttgaggaacataggaatattgttcatgattgttgcactattgattggtgttggaagttttggaggaaacaaagcatctgctaaaaaagaatcactgaatcaatcttatgcatatgcttataaaacaaaggacaatgtcagttggctgaaggtgactgaaaagaaaggcaaggtcacgggttacctaaacggtaagggtgttaagattgatccaattgaaccttttatggttaaaacaaaatacaagctaacggggaaaaccaccaaaaaaggatacaaacttaaagtccaacaaaagaagaaaacaatcgtatatgacatctatttttctggaaaagatctcatggtcaaaaagcaaggagcaaagaaaagtaaacgctatcaagctgttgatgagaagaaattaaaagaatacaaaaaagccatagataagcgctatgatgagtacgtggatacagcagaagaccgttactatgagatcatagggaaatacacagataatttaaataaagcctacggctatctgtatacagcaaaaaacaattcatatcaaattttccttgatatcgaagaagccgtttttgaaggggatttttcaggggctattacaatctccaaagccacagggaagaaaagtaagccattgaaaaaagaaaaatatcaagcagtaggaaccacaggttttaaaaacttttgggtatatcccacaccaaaaataaagtgtggcttgtctaagatgatagggtcatctgatgtagaggcttcctatattgagttaccgatttggaaaaagaatgaaaaaatgaaactgaaagctgtgaataagaaacaatatcaaaagcaagaagaagcatttaaaaatgccgcaaagaaaaaataatgataataattaagtcagataggacatttgagactatctgactttttcgatttaaatttcctctaaagtaaaatgaggtcgttttgatgacattagacttgtaaaaaaatattttttaaattcaaaaatatatgttgacgcttacattaactcaatatatactaaaatcaaatccaatattgataaattagacatgtgactggtcatgcaggcaggatctaaaaacgatgaatttctttaatttgtcgttttaggtcctttttttattgccgaaatataggtctcatgtatgagaaaagggggagaaaaaatggattacacacaggttgccaaagacgttttacagcatgtaggtggcaaagaaaacattgcgcaccttgagcactgttcaacaagacttcgcttcacactgattgatcagaagaaggcagatgtaccggctctagaaaaaacgccaggtgtcatagctgtcagaatgtcaggtcaatgccaagtggtcattgggaatgacgtcatcgaagtgtatcaaaagttaacaagtttaataggtagcagctcatcagggaaagacgcgccttccaatcagccaaaagaaaaaagaaaagcaggcacagttctgttagatttcattgtaggtgtcttccagccgcttgttccagctatcgcaggcggagggattttaaaatcatttcttctccttttctctttattaggctggatggatgcaaagggccaaacctatcaaatattgaacatggtaggggacgcacctctttacttcctccctttactagtcgctgtaacgactgccaataaactaaaagtaaacccactggtcgcattatcagcagtcggtgcgctacttcttccgaacatgacggctatgcttactgaaggtgcgcaattgatgacattcgacgtaaaaaatatagcttatgcgtatcaagtgttcccagcaatcctttctgtattgctttacgctcaaatggaaaaattctttacacgattttcaccaaaaccaattcggattttctttgtcccaatgatgtcattggtcattactgtaccagttacgttacttctattaggaccgattggttttacagcaggacaaggtttttcatccatcattcttgcaatgtttaatacagtaggctgggtagctgtcgcaattttagcagcagtcctcccattcatggtcgcatcaggtatgcacaaagcaatggtcccttatgcagtcacaacgatgggaacccttgggaaagaagcactttatttaccagcatcacttgcgcataatattgctgaaagtggagcgtgtttcgctgtggcactacgcacaaaagacaaggtactcagatcaacagctatttcggcagggatttcagcattttttggcatcacagagcctgctttgtatggtgtgacacttcaaaataagcgggtccttggaagtgtcatgattggttcgtttgttggcggaatcttcattggattagttggtatacaagcctttgtacttgttggccctggattagcaagtatgtcgatgtttatctcagatgagctcccgcgaaatctgatgtttgctgtcattggagcagtcatttcgtttattgtcgcctttatcgctgcttttgtattaggtaaggataaaacaggagaagaaaagacaaatgatcaagctgcatttgctgaacaaattggggcaggtgaaacattcaaaagccctgtgattggtcaaatgatctctctatctgaagtaaaagatgatattttctcttcaaaggtcatgggtgaaggaattgccatagtaccttcaaaaggagcgctttatgcaccagtagatggcgaggtgaccttgctgttcgaaacaaatcacgcacttggtatgaaaacggaccagggggttgaagtattattccacattggcatcgataccgttcagctggaaggacagtattttcatccaaaagtgcaggcaggagaacgtgttcaagcaggagatttactgattgaatttgatgtagaaaaaatcatagcagcaggatatgatccagttacacttgctgtaatcacaaatacagatcaatatgatataaaggtacagccattacaagaggtcaatcgtcaagatacattgatggttgtcacacaattaggaggctaattatatgacaacaattaaaggttttccaaaaggatttttatggggcggcgccattgccgccaaccaggcagaaggcgcctggaatatagatggaaagggaccatcagttgcagatattgcaatgtatcgttccaatttaagtgtagaagattatgaaggacatcttgctgttacttctgaaaatatagatcgtgcaataaaggatccagacgataaaaagtacccaaaacgcagaggtgttgatttctatcatcactataaagaggatttggctctatttgctgaaatgggctttaaaacacttcgcatttctattgcatggagccggatcttccctactggagaagaagctgaaccgaatgaaaaagggctgcaattttatgatcgtgtatttgccgaaatgaaaaaactcaacatagaaccgattgtgacactctctcattatgaaatgcctttagcccttagtgtgaaatataacggctgggttgaaagaaaagtggtcgatctctttgtgaagttcgccaatgtttgtttcgaacgttatcaacatgatgtgaaatattggctcacttttaatgaaattgatagtatacaccgccactcattcattactgcaggaattattcctgatcgttgcccagaaggaaaagtagaagagacggtgtatcaagcgcttcatcatcaatttgtcgcatctgctcttgcaacagcagattgccatcgtattatcccaggcagccaggttgggtgtatgctgacaaaattgacaacgtatccgcatacatgtcatccgaatgatgtggaacaagccttgaaacaaaacttagaaaactacttctatgcagatgttcaggtgtttggcgaatatccgccactgattacacgtatgcttgagagaaaaaatattcaaattcatatggaagcagatgatctaaccattctaaaagaaaacacagtagattttatctcatttagctactatatgtctttaactgaatcagcccaagaaggattagaacagacagaagggaatacgattcgtggagtcaaaaacccttatcttccttcaactgactggggctggcaaattgatccggttggtctgaaaatttctttaatcgaattgtatgatcgctatcaaaaacctcttatcattgtcgagaacggaatgggtgcaaaggatgtagttgaaagtgatggctctatccatgacgactatcgtattaactattttaaagagcatttccgtcagatgagagaagcgattgaagaaggcgtcgatctctttggatatacgagctggggctcaattgatattattagtgcaggtacatcacaaatgtcaaaacgctatggcttcattcacgtagatcaagatgatgatggcaacggaaccttaaaacgatctcgaaaagactcattttattggtaccaaaaagtcattgagacaaatggtgaatcgcttgattgaacaccacaatcatgaaaacaggtgatgacgatgtttaaaatcaaaaaagttttaaactcgagtgtggtcctggctgaagatcagaaccatcaggagatggttttgtttggccgagggattggctatggacagaaaccgggtcaaatgatagaagagaaaaaagcggaccaagtctttatgtcagtcgataacttgagagcaaaagaatttcttcaactgttagattcaatgcctcaagagtttatcgatttaactcagcacatcgtccaatatgcagaaaaacggttaaattcaaatctaaattcaggtgtttattttaccttaatggatcatttgaattttgctgtcgaacgacataaaaagaatattaatattacgaatcgcgtgtactgggaaatcaaaaattactatactgaagaatttgaagtagggaagtacgcacttgagttagtaaatgatacattgggcatacaattaccaaaagaagaagccgccaatatcgcctttcacttaattaatgcattaggtgaagaatctgattcgaaagatggcatgaaatatgccaaaatgatcgggagtattgtcaatcttgtgcgctatacattgaatatgaaaatggaccaagagaatattcattacagtcggttcattacacatgtgaagttctttgtagaaagattttatgcaaataaattactctcagatcaagaaaatgagttgtttgaacaaattgcacacttgtatcctcaagcgatggatgttgcttttaaaatcaaagattatattaaacaggtgcatagtatcgtcattcctaatgatgagcttacttatcttgcggtacatatacaccgcctcatatcttatcagcaattaaaataatggtggaaccacttgccttatgatcaggcaagtggttctttgctatgaccaatttttatattaagttccgataggtcgttctgttgtaccagcattcgtctcatttaacgaattgaaagacgctgtttgtccaaaaacaacgatggttaaagcgatgatcaataaactcatttttttcattagaattcctccagtcaagtataggatggttcctgtgataggcttcctttaaaaagagataggcttgatgaatgtcacccaaatcctcaaagtgttttgcagctagagcacttaattcacaggcaccttcagcatcctttaattcttttagaatgctgatttcatcgaaacaggcttgagctttttgaaccatatcttcagtaaaatatagatggtaaagcaaattcatttttgctgtatagatggggcatttctctgattcatgtttttggttgaccaattcgaagtaatagagagcttgtgttctttcatcaatagagagcagctctttgactaacataaacatggagtgatggaaatagcacgatgagaggtagttttcatcacttagagccttttctagggcatcgatacattttttcgattctccagcttcggcatacagaatactgatattatgaaaaagctgtgaagttagaaaatgatcatttagactgtcagctatgtgtattgcttttttgtagtagttttctgctcttatgaagtcgttaatgtccatataattagcagcggcgataacaaaggctgtcgctagtcttctttcatatccttcatgacttttgaaaatatctatagcattctgaatatagtgaagagaaattaggctttgacgaagtagcatatataagtttgcgattttcgtatgaaattctgctacttctatttcatccggaatgttttgcagttttttctcggcaattttaaacagtccaatggctgatgcgtagtccctgttatatgaagcgtaaagggctttgtataggtaaaaatagtattcaattaaatcgtttgttttagaggggcaatctagctctgtctgttcattcagttttttacctctccgttcatataacatgagtttatacttgccttctagcaatgaataataagtcaagacctcctgattctcttccatttcttgaagtaattgctttaattctgtgtacattgcgttagcactgtgtacatcatgcttgcgaatcgcaattcgccaatcatttaaacggttccccacctgttcagcagaaatgatagccatgaaatttcacctctttaagatcctttcacctgtttcactaaaaaacgatatcacaatttttggaagaatataatcatttctgcgaggtgattgccaagaggtaataaaaaggacctaaggtcatgtgatgtacgaaattgtaatggtgattgaatgtttttacaaatgattaaaatctttttttagtcgtctaaaaaagggatatatacattgggttttataattatgttcgaaaatatcactggtatattacaaataaagtgattttaggtaaggaatagagaagttggagggtcgatctattaaagaaaatcagttatgatgatgctagatcaaatttggaatagaaactgatagaagcagacaaaagacaaaagtaaatgccaatcacaaacactagtctattagaaaggacgttgatatgaaaaaaagatttcaaatcttaaactggcaaatcacagtgatcatgacgacactgttactcgttttagtgactctgtatatgtcaaagagatacttttatagcaaagaaatagagttactgacagaatcttgtcaacaagtaggcggcaaaatcatattagaaacaaatcgtttttcgatggattattcgtttgagtgccagaaaaagtagaacaggcagctttctgcctgtttttactccaattacaaacctaaattttgcagccattgatttaatctaaattctcgattctcggcagttgagtcatcatatctccctaaatgtaagctggctgttatttctccgtcattcataaacatgattctttcagaacgaagagcaacctttgggtcatgtgtgacaagcagtagtgttgctccttcagaatggattttcgaaaatatattcatcacttccttcgttgcattagagttaagagcacctgttggttcatcagcgaaaagaatgtctggttcattcataagcgctcgacagatagaggccctttgaagctgacctcctgatacttctgacaaatatcgatctgctaaatgatcaatatcaagtttttccattaaatatctagctcgttcattcacttcttttcttggctttttctttgttaagtaagctgcagcaatgatgttgtcaaatagattaagattttttagtaagtggctgtgttgaaagacaaatcccatatctgttaagcgcagagcagttaactgtttgtctgtcatttctgatagtaatcggcctttatatttgatctcacctgttgaggctgtttctatcccgctaagttgataaagcaaggaagttttcccgcatccggaaggtcccataatggtcacaaattccccaggctttatcgatatatggatatctttaagaatgatttgtttctgtccttttaaagaatcgatttgcaaagacaatcgctttgtttcaatcaagtgttccatgtgaaacatctccttatgaaagtgtatgacgtgtagtttgattagtaaaaaacgtcttcaataacgaagcggttaaagctaagctgacaatcaacagtgtgattgggtacacaactgacacccattgtggtgccagccactgcaggcttgatgcccctagggaggctccacctacactcatcaaagctggtccaatcgtatggacagcgatcgtaccaataaaggcgcccaaagagataacgacgataaaacttgtgatatattgtgctgttacatcttttttagaaaatccaatcattcttaacatgtggtttcgacttgaatctttcgtttttaacatgtgcagaaacatgaatagcatcaaactggcggttccaaaagcagctaatgtagacaaaaatgcaacgatttttactaaagaggctgtgctgccgattgtttgatgaacgtattctttcatatctgtcacttttgcaggagatatccctttttcaaatactgtctttttctccgcaatttctactccttgttttagttggatttgaatggttttccaaagggttgattgggaaaatggctgtgatattgctttggctgttttgccgccgttggtgacatcctgataaatgccagtcactgttttttgaatttcatgcccgtttgttacgagagtgattttttctcctacctttttctggagtgaatctgaacttagtactgataaggcaatttctttattctttaaaggctgtcgcccttgtaaataggtgagaggaaatgctgagagatcacctgtttctaaatagagtgtttctaatgtattctcctttgattttgcctgaagagaagttgtttcatatatggctgatgtatgaatatcccgatcttcacgaatcattgattctatttcatttgtattttcctctagatgatttccttgtcgtatatcaattcgaaggtcactttgaccagagccaagatatgtgatgaaatccggcgattgtaaggtgtgccatagctgaataggcagcagcatcaaaaatgtacaaagcgcgataatacaagtaatcgttgtgtacaacttctttcgtgataacagatcttttaaaccaagccaaatattgaccgggatgaacctgtttttcttgagatgtaggggtatttgttttttatcattcgttgaaatagcgccgccttgaagtgcttgagcggctgatactcgaccaaactttcttaggacagcatagctgcaagaaatgacgatcattgccatcacaatagaaacacaaagcgggatgaaccaagaagtaaaagaaggctgattccccatgtagcgctgaatattggccgtaaacaaatcaccaaataaaagcgttaacccatatcctgctatacaccctacacaagcaagcacggcatactttccaacgtataattgcttgattcttgttaaaggaatcccaagcaccttcagtattccaatttcacgttcatcctcttctatagaagctgtcatagcaagatggagagagaggagggctataccgataagtagcatgcaaacaagcaggagaatggcaatcaccagtccatctgtcaatgcattcagcatacggagcaaaggtaatgtgacagctggaccttgctgtggaagctgtgatgactggtagattgcttgaaaggcatctgcctgagcggcatcatgcagtaaaaattcaattaaatattcctttttatgaaacacttgattcattgcgtcccaatccttgtgatgaagaaggaatcttttcgaactaacaagactggggttcatttgtgcatctcgcaagaacgctttgatgcggaaagagaattgattagaccctttcccaatcagtaacgtttctcctatcttgagatgatacttttgttgaaaatagatagggacagccacttcacctttattgacagtgagcttttcattttgttcatttaaaagaaaatcaaaatgacgattttgtttcacaaataaatgatccatcacacctgctttggcgggttcatgtccgaacttgatgtttgcatgttcaattggaatcattgggacgatttgatgtgcttttaccatggactgcttgtttgaaaatgcttcaatgtctttttcatttaggctgccgtcatgcatttggacaaaatccggtgccttggctgaatggagcagattagaaatggaaccattcagctgtactgtcatttgagcggcgtttgttgcgagaaatgatgtcaacataatacaaatggttaaaccgatggaaatgagacggtggcgggttaagtctttctttataaacgtcagtctcatgaggctgatactccttcatgttgaagcatattttttgttaagtaggcaagggcaaacatgaaagtgctgactattagcaccgtcacatacatgttggctgaaaacgtattgaacaagaatccatacatcatttgaccaagcggggcagcacattgagaaaccattgtcaggttcgccatcacttttcctaattgactatttggcgttttcttttgaacatgtgaaattacaacgattgagatcattgtaagcagcatagcaattggaagacatcctgctagaaagagaaaataagctggataagtgccaaattgaagagctgtgttggatgttgagaatgcgacaggtagcaagatgatcgcgatgacgatcagccagcgatataaagtaggtatctgccaatgctttgctacaagtccaactagcagagcccctgcgatcacagcgaactcaatcaagcccatgcctattccatacatgatgtcactgcttttcattgtgacccttaaaatgattggaccacccacgataaaaaatggcgtgaggatgaaatttaacattgcagcaagcagcatggctctttttaaaaatggctgactgccaatataggaaaatccctgtttcatatctattatgagcactttgcccatagtttccgttagcgggctaggtgagaaggatatgtttaaccgtaaaagcatgcatgctgatagaaaaaacacgatagcactggcacctatgatggattgacttccaatcagtccgtacagaaccccgccgataataggagcgagaacacctgaaagtgcctgcacgccattgacgattccgtttgcttgttctaattgttcctgttttactaactgtggaatgctggacatcacagcaggagcatagaacgtactcatcacaccaagaagcaccatgaccgctccgatcatatagagtgaatcatttcctgagaataaccaaaaataaaaagccagaatcatgatgccggtgagaacatcaaataaaatcatcaagttccttctgttaaaccggtcagcgattgctcctgctaagggagaaagaaggagtgggacattggataaagcgaatagtaaggcatataagtcaacacgctgcgtcatatccagtacgtgtaaagatagaacaaaccgaattaaggaagaaccaaaaacggaaataatttgtccgagaacgaggtacataaagtgggatgaacctcttttggataacaaagtcatgagtatcactctccttttagaccgaccgtcagtctataatgtatgcaggattggtattgaagtgaccaatcactaattcttttcatccagctctccagttaatcgctttagaagaaaggagaagctccccttttctgcatgtaatgaggattcgaggatatcgataaaagctagagcgcgctgtatactttcttcggctgtccattgaaaaaggccctcatcaaatatgacctgcgcagaagcaagaaggaattcaaccgtttcttgcgggaactttgttttgaatgttccttcttccaccccttgctgaatgacgtctgccaatacgggtgatagttctttaatcgctttgattaagcttttttggtgcatctctgcattagaaggctgatggaattgttcaatcatcccctgtttattgcttccttgctgaggcgattgtgccatgatgatacgaaatagtttgtcgacgactggaaggtctggctcagccgcaatacgctttgccacgatgatatctgctttgatgatcctgtcaataatggcatccatcacttcttctttggatgaaaagtaataataaaaagtgccttttgcaatgccaacagctttcagaatgtcgataatcgttgtttgctgatagcctttggtagaaaaaagctcttcggctgcgtttaagatgtcatttttacgttcttcaggatgtttaacggttctcataaagccatcctttcttttgactagactgtcggtcgatcctttgatttgattaaacacttttcaatgtccctttgtcaatgcctcatttttgaacactttgcatttattgtgcaatgacactatgatacattgaatgaaaacagcctcaggagagatgcctcatgcaatttttaactgctgaattggcgcaagaaatggttgaacgtacgatgcgtattttagataaaaacattaatgtgatgaatgcagatggtgtcataattggttctggtgaacgaaacaggattggtcagaaacatgatggtgcacgacttgtgctgacaagcgggaacagtatggaaattgaccatgaggcgtccttacgcttagaaggagtgagacctggaatcaatttgcctatttgctttcgtgaacaagtagttggtgtgattggaattactggtgagccagaggacattcggcatcatgccgagctggtgaaaatggcagctgagcttgtgttagagcagtcttttctgcttgaacgaattcagtggcggcaaagaatagagagtgaaattgtcaatcagttaatttctgattcggacgttggtgatcatcagctaaagaaccgagctgcatggctgggaatggatttagataagcgccgaatggtcatcgtttttcagccagttccatcctcggaagacgctgtgcataaaatgatgcatgcgattcaatacgataagaatgcggatgatttgcttggcatgacctttcgtcatgaattggttcttttaaggcagccgatccctgatcatcgtttaaagcatgtggcagggcagctgcaaagaacaatggaaaaagcagtaggaggtcaggtgctggtggggatagggactgtcgctgacgacataagccggctgccattgtcttttgagcacgcaagagatgccttgaggttggggaaaactcttgatcccgaggagagtatttatttttttaaatcttatcagttggaaaggctattcctcactgcaggagctgttgaagaggagattagatggactgacttttacaatccattaacacaggaagcggagctcgcccaaacattaaggatttacattgaagagggcggtgatttacaaagaattgttgatcgtttatttattcaccggaatactttgcgatatcgtttagataaaattcaagcattgaccggaaaaaatccccgtcatgtgaaacagttgatggagctttatatggcgcagttgatgagtcaactatcttgattgtgcatatgcacaatggaatgaagggataaattaaaaaaattcatctagattcacaacccgatccccactagtaaacgcttacaattggagaaagacattttgggggagatcgaggatgagtggagatgtgacagtaagtacactgggagccgtgacggcgcttgtgatagcgattgttcttattctaaaaaaagtatcacctgcatatggtatgctggcaggtgccttcataggcggcttggcaggcggtgtagatattgttcagaccgtcaacgtcatgatggaaggcgctaaggatatgattccggctgtcctcaggattatggcggcaggtgtactagctggcgttttgattgagtcgggtgcagctttaactatcgccgaggctatcgtgaaaaagcttggagaggcgagggcgttattagcactcgcactggcaaccatgattttaacaacagtgggcgtttttgtagatgtagctgttatcacggtagcgcccattgcacttgccattgccaaacgggcaaagctgtcgaaaacggggattctacttgccatgattggaggcgggaaggcagggaatatcatgtcaccgaatccgaatgccattgccgcttctgatgcttttggtgtaccgcttacttcaatgatggctgcgggtgtcatcccggctgtgtttggattggctgttacatatgtgttagccaaaaagcttgcaaaaaaagggacacctgttcttgaagaggaaactgcgcaaagcaaagttcaagtgccagctttttttcaagcacttgcgggtccgcttgtcaccattttattgttggctttaagaccgctttttcaaatcaatatagacccaatgatcgccttaccgatcggaggcattgtaggcgctcttttcatgaaaaaagggaagtttctcaatgattatgcgatatcggggcttcataaaatgtcgggtgtagcgattatgttattagggacaggcacactagcaggaattgtatcgaattcttccttaaaagatgtgtttattcaagcactcgatgcatcgggattacctccgtatttacttgcaccagcttcagggatatttatgtcagccgccaccgcttcgacaacagcaggaacggcggtagcgagtggcgtatttagcggtacattaattggccttggcgtatctgctctttcaggagcagccatgattcatgctggggcaacagtgctagatcatatgccgcacgggagctttttccatgccacagcaggaagtgttcaaatggacatcaaagagcggttgaaactcatgccatttgaatcgttaattggtttgacattaaccgtcgtatcgaccattatattcggcgttttccagttgtttggctgatgacatttgataggaaacgaggggctttaggatgaaaattgtgattgcaccagattcatttaaagaaagtttatctgcatatgagacagcatgtgccattgaacgaggatttcatgcgattttgccaaacgctgaatatatcaaacttccaatggcagatggaggagagggaactgttcaatcgctagttgatgcgacgggcgggcacattgtcaatcaagtggtcacaggcccgcttggggagcctgttgatgccttttttggcatgttaggggacggtcagactgccgtcatagagatggccgcagcctctgggttacaccttgttccgcaagaaaaacgcaatcccttattcacgacatcgagaggaacaggggaattaatgcttgcggcactggatcaaggagcgaagcatgtcatcattgggcttggcggaagtgcaacaaatgatggcggtgttgggatgatgcaaggattaggtgcggcttttcttgataatgcaggacaggagctatcgcgaggcggtggagcccttcatcaattagcttctattgatctatctggacttgacccaagactgcaatccgttcggctggaggcagcttgtgatgtggacaatcctttaacgggtgaaagaggagcatctgctgtatttggtcctcaaaagggtgctgataaagaaacggttcaagtgttagataaaaacttagctcattttgcacaagtagcagaaaaacaattcaatgtattttttgaaggtgtagcaggggcaggagcggcaggaggacttggtgcgagtttattaggctttttacacgccgatttgcaaagaggaattgatattgtgctgaaggcagttcattttgatgatgtcatcaaggaggcagaccttgtcattactggggaaggccggattgaccagcagaccatttatggaaaaacgccaattggtgtagccaaagcagcaaagcagtatcacctgcctgtgattggtattgcgggctccctctcaaaagacagtgcagttgtacatgagcatggaattgatgcactttttagtatcgttccaggtgtaacttctctttctgaggcgatgagagatggggctcttcatgtagagagaaccgctcggaatattgcggctgctatatcaattggaagaaataagtaaacgttgaaaaatgtttccttttctatcacattcctttctatagaaatgtggtaaaattgtatgaaataaaatagaaagttggaggaaacacaaatgtctaatctaccgaattgtccttcatgcagttcaccttatacttacgaggatggcagtctgctggtttgtcctgaatgtgcgcatgaatggtcacttgaacaagaacaagcggcagaggaccagcttgttgtcaaagatgcgaatgggaatctgttaaatgatggggacacggtctctgtcatcaaagatttaaaagtaaaaggttcttcttccgttttaaaaatagggacgaaggtcaaaggcattcgtttagtagaaggcgatcataacattgattgtaaaattcctagctttggcgcaatgaagttaaaatcagagtttgtgaaaaaggtattatgacaaaacagtaagtttgtattcatcttattaatgacattccgtttatgaaaaaatttcagtaaagagcggacggtctgctttatttgtttcttaattatttagaaataaagatttggtctgtaacgaacgaaaaacacctaagttgttaaagggaatatgtctcttaacaatttaggtgtttatgtttttcatttataatatacaatgtaaaaattctattgtcatttaaaattttataataaagtagaaacttcccataatgcttctataactttagtgatttttgcaccgggaacaaaagtgagaattaaattaccgatatctagaatggctcctcctaagtctgcccatgagaatttgccatcaaatgatctatagatgattttaagttttgtggttaaactgtctaataatctgcttacatccccaacaatattaaacttcctttttagtactgcaacgatgctatttgctaatccagctgcacctgttccagatacaaaaaaattataaaacatcttaaatccctccttaatatttatttgcaagtctattatatacacaaaaaaagaataaaaaggataatattcccgaaagtacttctaaaaccactgaaatgttcttatttcatcatgtatagtaaatataacctttaaagtttaaatctgtcttaaaatatccaaaaaatattgataatgtattaataaaacatatattataaaaaatgtaaaatacattcaaataaaggagttatgaaatgaaaaatgtgtgggttgcaggatttttatctcttttaatgccaggtatcggtcatctttatctaggaaaggttttaaaaggggtggtgttaattatactaaatattttatttatcacgactatgtcaactctaataggattactctgttttcttgcgaattggatttatgccattatcaattcagttaggatagttaggttcaccaattataaaagttaacattggagtgtttggaaatggatattaaaagatatatatcactatattttattttaagtatcagtattatcttttttattaatatttttatagagcataatacggaaattagtgatataccggagttaagttttgtggatgtattttatatagctatgaataatattttctttacaatctttgcatatattatgtctctattcggattgtcatttattttcatttttaagattatatttttaattggtgagggaccttcaacagccggtattgaccctgtaatatattacttctcttcaatatctcatggtttactagaactttttgtaggatgtttactcttttgtttttcaatacagtttcttaagatcattattgattatacaaagggatatgtgatggtagaaactatcaagtgttttttaatcaaaacagtaaaatatacaatcccgtttgtatgtcttgttattttaataggggcattgtttgaagtctatatttctaataaattaattaattttatattatcaatagggggataaaaatggaatttggatattttaaaaagcctgttatgaaaaaaacgactaagtgtatacctattattaataaagaagatgtcaaaataggattaataaaaaggttttataaaaataaagctgagagaatttttgatcatatatttgatgaattctttgtgaatgttgaagtaatggatgcaaattcaaacactcttgtaaaagctactgaaaatataaccctaaaatcaatgtatcgttcaaattgggttatagattgtaaggataaaggaaggttagtcttagaagatagaactaaaattaaaacaaatccaacgatgaacttaataataaatgacgatatttattatttaaagaaagattttgcagatagacgtgttagattggaagactcaaatcaaactatagctgaaattacatatgataaaattctgcctcctgcaacagttactattgaaaaaaaacaggatgacttatctgtacatcttattgcatgcctctattatatttttatgttaagggagtagggtttagtaatgattaagattgttgataaaaaacttattataaaaaagaaaagagatattcattttgttccacttaaacaagtattatattttgaaaaatttaatcataagacatatgtgcacctagaaaacaaaaatgaaatttcattaaatatgtctttaaagcaattagaaattattttaccaagtaattttaaacgaactcatagatctttccttattaacaaggagttattagaagggttaatatttttaaatgaaaagtcatatgaggcaattttcccgaacaataaaacagctctagttgttaaaggttgtctgagtatggtaatgcctgaaggagttatcaatcatgattgagatagaaaaggttacaaaaaaaattaaatcgactgaaatattaaaagatatatcttttagtttaagatgtggagagatagtaggtttactaggtccaaacggagcggggaaaaccactttgatgagagctattttgggcttaacatcaataagtaaaggagacataagatttaagggtaatagtatactgacgaattataatttttttttaaaagaagtaggtgctttaattgagacccctaaattttatcctgatttatctggatatgaaaacttattttattacgatatattaaataatagaaaagctaatgtgcatgaaataatgaactcccttgggttaggaaattataagtacctaaaagtgaaaaaatactctttaggtatgaagcaaaggctaggaattgctcaagcaattatgcataaaccacaagttttaattttagatgaaccgatgaatgcactcgacccatcaggaataatgttcttaaaaaaatatataaaacattttgttgaaaataagggatcagttattatatcgagtcatctgatctctgaaattgaatccatgtgtgataaagtccttataatagataaaggagatgtaaaaaaaagaataatcatagatgaagacttttctcaatctggttttttttctattcaagttaaaaaacagaatttaaatgaggcctatgatttattaaaagactctattaataaagccataataaataagagccaatcaactttagagtttagctgctctaaagatagaatacctgggttaatttatatattattaaaaaagaatatcccagtttacgaagtaaggaagttaagaacacctttggaagaagtctatttcaaaagtatagtgggaagttagatatgatatcaattataaaggcagagttttataaacactataaaattaaacataactatctttttcttattttcataattctctgtatagctgttagcgggatagagctattcaatcagtctgcaacggattggaaacaagatctaaaagaaaatatagaagtagatgagaacctcctaagcactttggagaataaaaattctaattattatttagagattgaaaaaaaaataaaattaaataaatattctttgaaaaacaatattccttcctttcaagaccacaattttttaggttttataatgaaaaatattaatatatgccttttgataggggtatattctatatatttatcaaccatttcattttctaaagaatttcaattagaaacttttgaatatctctttattaggccatataacaaaaagaaaatacttatcggtaaattcctttttattctgatttattccttgtttcttttctttagtctatttatctgttcaatattggtaggtatgatcatacatggtgttgatttaaataatcttatatatttaagttttgaaaatgacaaaataatagagaagaacggtttggagattgtgatttttacatattctatgtattatctgagttctatatcgtatacaagtttggccttcatgctcacaaatgtctttaagacaggtggcatacctttcagtcttactattttcagcatgctgtttggccaaaacttaataaatgcattaccaaagtgggtatctgatttatcattattttcaaatgcaaatagcataactcatttaggtactctaaaaaatacggctaatcccataataattttaattttatacataatagtttttctatcaatatcaatctatttctttggaaagaacaaaaattcaaacaataagtaatttttccatgaagtgattttcttaaccctaccttaaaaaaggcagatgattcgctaaattttggctaatccccttcacaacttttgggcattgctgtaccatatggaagtgttcttctatttttaacggatcatggtgtttatcaggaaatagatgatagatgatacttagacaaagaaggagaggtaacgtgacgaacgttttagaactgcataatgtatctaggcatattcacgggaaaaagattgttcaagacttgagcttttctgtccaagtgggcgaagtctttggcttcttaggaccaaacggcgcagggaaaacaacaaccattcgtatgatggtcggtctttctcctattacatctggcgacattctgattaatggtcatagtattcaatcctcatatcagcatgccattcaagatgttggtgccataattgaaaacccagaaatgtataatcacttaacagccagacaaaatcttgttcactttgccagaatgaatgggaaagtggatgaagggcgaattgatgagttgctagagttggtcagcttacagcacgtgaaacataagcgtgtccgtacgttttcattaggaatgaagcagcgtttaggcattgcgcaagcactcatacatagaccgaaactgcttatattagatgagccgaccaatggacttgatccagagggaattcgcatgatacgagattacttgagaaggcttgcaaaggaagaagggctggctgtcattgtttcaagtcacctcatgtcagaaatggaattgatgtgtgatcgttttgcgattatccaaaaaggaaagttgattgcgattgaggatcagcgtacagagacgaatcaagacgaactggtcaattatcgaatgaaggtcgaatccggtgagctggaagaagcgcagaagctcattggtgtatttgaggaaggcacgactgtaagagaagaggagcagtatttattcttctccttgccagaagagaaaatgccggaattgattcgtcatttgagtgacgcgtccattcatttgtacgaaatcaaaatagaaaaacaaaccttagaagataagttcttaagcttaacaagtaaaaaggaggcagacgtatgattcgcctcattcaaaacgagtggatgaagatcagttatcgtgttggaacttggattatggttggacttcttgttttaggtatgattgccacactgatctttgcagtgaaaacaaatgacaaagatcaagcttcgggtgattggaaaaccgagctgagaatggacaataaagaaaagaaacaagaattgaaagagaatgatttaggattttataagagatccctagaaaaggatatagcaattaatgagtatcgcatcaaacatgatttgcctcctgcggatcaatttggtaaaaatgcatgggcttatgtgaagatcaatgctgatttgcttcagctggtcggtgtattcgtgattatcattgcagccacgattgtctcggctgaatataagcatggtacaattaaattattgttaattcgtccaccatcaagaatgaagattctcttatctaaatactttaccgttcaactttactcactatttcttatcgcggttctatttgtcctatcatttatcttaggtgcgatattctttggattaaatcatgattatgtgtatttgtcctatcaaaatggtgaagtcattgaacgatctcagcttgcaaatatggtttcgtattatttggcacattgtgctatgtttgttgtactagggacactttcttttgccatctcaacggtatttagaagtgaggccatttctattgcgatcagtgtgttagcctatattgttggagcatccatcacaagtattttgatgttcttctttgattgggcgaaatacttattgtttgcaaacgatcctgcacaatattttgcagacacacctacttttatcgaagacatgtctctaggattctcattaacagtcctagtgatctattgggctattttcttggcgattgccttaattgtcttccaaaagcgagaagtgaaaacaggtagttaatttaactttttaggaggtttacacatgattagacgtaaaggtgaaaaaattatggggattattagtattgtcctcaatgtcattggtgttggatttggagcattaattctctccttaggtccatcattttatgatgaaatcaatgaagtgttacaagaggaaggagaaacattgccgattgaaacgcttcaggcttcggttaatgcatttggtactcagttcatggtcgtttccgcaattgcggctgtgctgtcgattgtcggtgtgattttcttgaaaacagaccgccgtgccgtgctttcaggtattcttttcttggtttctgctgtgactcttttaattggaacagtcggtcttgcatttgctccaatggttctattgtttgtgattggattgatgtctcttattagaaagccgaaaacagacattcacacgagtgaatatccttcataaatacaaagaaaaagacatgcgtcgttgtacgcatgtctttcttttttaaatgataccgatcagcatcgccacgaacagaaggataatactgaatccccacatccaaaagaaggagtagcggatatgtttccccatatcgacccctgcaaggcctatcgcaagccaaacggctggagcgagtggactgacaaaggttccgatgatgttaccaatcatcatggcatacgcagcggaagtgcccgacacgccaacctcagttgtaatcgattcgacaattggaagtagagcataataataggcgtctgtacttgtcagcatatccagcggtaccccaaacatcccaacaatgatatgtaaaaaaggaagcaggaaagcaggtagaatctggatgctgtccacagcaatagcttttagcatgcccgttccttcgagaattcctaaaaatgaacctgcggagaaaataacggcagccatcatgagtgcactaggtgcatgcgccttgattctctccatttgtacatccactttcggatagttaattaatagtgcgagagaaagaccaatcataaacatataactagccggaatcacgttgagcacaagaaggacaactacggctataaacagaatgaaattcacccacatcaagtgataacgttttaaagcggcgtcacctgtctcgctaatggattgaatagcccggtcccaatctgcgccttctaattgaacagcagcgatttcgtttgcagcgatttttacccgaatgcgtttttcttcccttttccctaaaataaatgccattcctaatacgagaacgactccaatgagctgaatgggaatgagcggcacccaaagttcagatgggtctatattcaacacacttgctgcccgtcctgtggggccagcccacggcaccatattggttaagccggcactcgtcccaatcaataacagcaataagtacggactcatatgtaattttttataaagcggtagcagtgcaggtacagttaataaaaaggtcgtagctcctgctccgtctaaatgagcgattactcctattagagctgtccccatcgcaaccgtgacaacatttccctttgtcagtttaatgagcgcttttattacaggttcaaagaaccctgtatcttgtaaaataccaaaaaataaaatggcgaagatgaacatggtcgccactggcagtactttaataatcccctcttcaaagaaagattgaatgtcattgattccaaatcctgcgatgaatgccccgattaaaggcaccatgaccatggcaacaattggacttgctttcccccaaatcagcaatacaacaatcgttaaaataatcaataatccaacaaacgttaacataagtccctccccctacaataaaccgtttacattttcttgctctttttatgacaatgcagtcccatatctgcattgaaaaaaagggtatcaaaaatatgagcattaggcaaccgctttcatacctatacaatggtaaaaaaggatggtgaatccattcgcggcgcggtatcaaacatgtcaaaaaatttagataaaatataacgattcaagggcatttctacaagcgaatatatttatataggtatttagaatcattaaaataaaagaagcgtccaatgaatgaacgcttctttcaaattattttttcaagatgacgtactcgtaagggtcaagctgaagctggtctggcacctgctcttcagtcagcatattttcatagctttccgctgaatctagtgatatgttctgcagctcttctgtaaaattcatcataaatacatagtcttgcgtgccatctgttcgtttttgtacactaactccctctggaatcacagatgataggacgggctgtatacccattcctgcgatgagatcctcgtaaaactcatcataaaaaatctgctcattttcggaagccatatagtatgcttttccatctccaaaaggatggacagtaagggctggctgtccttcatagcagccattctcaaaatgccctaacacagaggccgtttcaggatgaatggattcgcaatattgcccgacatggtaggtgcgtccattccctgtggttattaacacatgttcatctggcatcaatgtgttgatttcctcagcccatatgccaagtacatgacggagagggccggggaaaccaccgaggaaacataggtcattttcgtcgaccatgccgctccaatatgtcgcgataaaaataccgccctttttgacaaaggcttcgattttttctgcgacgcctggtttgatcatgtagagcattggagcaaccagcacacgataggatgagaaatccttttccatgccgacaatgtcaacagggatgccttttttccaaaagcttcgatagtgagtttgacaagcctctacatagcgtttgtttgtattatttaagccttgtgcatcatcaatggcccagtggttttcccaatcgtatatgatggcgacttctggttgtacggacgtgcccgcaatgggctgcagctgctccaattgttttcctagatcagcgacttcttgaaacacccgcgtatgttcatgtccggaatgatcgactacggcgccatggaatttctcggaggcacctcggccttggcgccactggaagtaaagcacggagtctgatccgtgggcaatcgcctgtatggcagaaaggtgtgccattcctttgtgtttgaccttattcacttcatgccagttcacaaggctcggtgtactctccataacgagaaatggctgaccgtcctttaatgaacgatataaatcgtgaacgaaggcgacgtttgacgctaattcggaggttgtttccctgccgctatgccatgctggatagctatcccatgaaatcacgtcgacctcttttgcaaattgatgataatccagcccaaggaatgggcgcatatgcgggtagtcgcccataaagttggtggtcactgggatatgaggcgtcaattcccgcagcgcttcaatttcattttgataaaaattgatcgtttgcgctgtgacaaagcgtttccagtctaggttcatcccgtgaatcatgtgctccccgtgcggtgcaggtgattcgatttgtgaccagtcactatacgtgtggctccaaaaacccgtccaccatgcttgattcaaaacttcaaggtcatgattgtatttgtctttcaaatagtcccgaaatgcttcctggcaaagatcacaatgacattcgccgccgtactcattcgaaatgtgccacataatcagtgctggatgatccttgtagcgttcagccagcagccggttgagtgtattcgttttttctcgataaaccggtgaggtgaagcaatgattatggcgcagtccatgtaaattacgctgacggttcgcttcgacgcgcaatacctctggatatgcttgtgacagccaagcaggtcttgccccgcttggcgttgcgagaatggcgtgagccccctgagctgccaagcggtccatgatgtcatccagccatgcaaaatcatactgcccttcttttggctctagcttactccatgcgaaaatgttgatggagaatgtttgacagtgtgcaagcttcattaatcgaaaatcttcgtcaatgatctccggcatatggagccattgatctggattataatcgccaccatgcaaaaagcctttcacatttgggtgaacgagtgggtaacgctttcccattttgtcacgtcctatccttttaattacggtgtcatttgtttaaatacatcaagagaaggcagtgcttttccgttgaaatcaaacatcgcttgattttcccaagcatttccgactgtaccggttgtttggatataagccagcccgtattgactagaccacggagcgcctttcgctggaatccaaagcggctcccaataaaagaacccttttccgcgattgttttttacttgtgaaattttctctgatagatctcgtataaaagatgcctgaccttgaggtgaagccgggtagccggctgttttgacagagtcttgattaaatgaattctctaggttgtcgccatttgctgtcgtaaacccataggcggtttccacaacaatcacgtctttgtgatagcgggcactaatatcattcatattagacgtcagaccattaaagccaccgtcccaatacgggtaataagatagaccgatcgtatcgaatgagatgcctcgttttgtgatttcatcaaaccaccagcgggacgcaccattgtcccctccgtgtgcaaggtgaagcatgattttgatgttagaatcgacagagcggacagcatttgtgccagcctttagcaaagcggcgagccggtcaaattccccgccgccttcaccccagctctttccatttggccacagcatgcctgagttcagttcattcccaacctgaaccatgttcggaagggcattttgtgctctcatcgctttgagtacatcccctgtgtaagtgccgaccgctttttctaaatcgctttgtgaaagagatgcccaagctttcggtttgaactgtttaccaggatcagtccagaaatcactgtagtgaaaatcaagcagcactttcatattttgtgcttttgcacgtttcgatagagcgatggctgtgtttaaatcatttgtcccaccgttataggcacggccttggttgtcgtatggatggttccacagtctaatgcgcacatagttgacgcctttttcctttaatagcttgagcgggtccacctgttttccgttctggtcgaagtatctgccgccgcttctctctacttctgcaagcatagagatatcggctcctttgatgaaatcaccttgcagtccattgatcggctgaacagaaatcgtatcggcttttgcttcaggcaaaatacctaaccccataaaaaagaaaacgacaaccgtgacgagcatccactttttcatcaaatctccccttatccttttgtcccgccttgtgtgaggccggatacaaattgtttttgtaaaacaagaaacaataaagcgactggaatcgcaatgagtaaagccccggctgcaaaggtcgtgtagctggcccccattttgtctgacacaagattgtacagaccgattgggagcgtatacatttcgggtgagcggacaatgacactggagatgatgaaatcacccagtggtcctgtaaaagagttgatggcgacaaccgccaaaatcggcttagcaagcggcatgataatctggatgaaaatccggaaatgccctgcgccgtccattctggctgattcatcgagatccttcggaatcgcatcaagatagcctttcattaaatacgtattcatcggaatttgcccgcctgcataaatcaaaatcagtgcaaggtgactgttaatcagtccaagcatttgagccaaaacaaaaatcgcaatcagcgctgaaaattgcggaatcatttgcagcagcaaaaagagcatcagcccatttttccgtcctttgaaacggaatctggaaaaggcatagcctgtaaaactgacaagaattaacgttaagagcatagtcgcaatactgatcttcattgaattccaataccattttgcataaagtgctccctgaccgaaaaagagctcggtaaagtggctgaacgttggattcttcggaaacatacttgtactcatgaggctgtttccaggattaaaggaagcaccgattgtccaaagcagtggatatagaatacaaatggaggcaatgaaaaggataaaataagtaatgctcaggcgaatgagcttgttttgttttgatcccatatcacatcatgtcctcctctttgaatgaattcgttctcttaaactgccagagtgcaatagcgatgacaaagattgaaagtaaaatcgtgacagccgcagcgagtgcatattgagaggactgcatcgtaagtttataaatccaagaaactaagatgtccgttcctccagcggttgaccccgcaacaggcggtcccccgccattaaataagtagataatattaaagttgttaaagttaaacgtatattgtgtgataaggatgggtgcaatggaatagagaacaagcggtaacgtgatggaccggaatttctgaaaaaaattggctccatcgatggtcgcagcctcatataaatcctcgggaatcgcctgcaaaacgcctgttgtcataatgaaaacaaaaggaaatccaagccaagtctgcatcgcaataagggcaattttgctccaaaatggatctgtcagccatggttttggatcaatccctatcgatgcaaaaagtgtattgttaatggcaccaaaggtatcattgaacagtccagcaaacaccaaaatggtcacaaagcccggaacagcccaagggagaatcaaaatggttctaaaaaaccgttttccctttaaatccttctgattgagcagaaccgctaaaaagatgccgagggcacattgaagggtcgacgcagccaaagtccatacgacggtccagccaagtacatcaatgaaggtgtctctccaaatatcaatggaaaagatattttgaaagttcttgattcctacccagtcgatcagattggcaggaggcgagtggtataaatcatagttcgtaaaggcaagcgcaaagctgaacataataggaaagacaacagaaaatagaagtaaaaagaaagcaggagtgctcattaagtaagggaagccttgatcgatgagctgatgatattgagcacggatggaatgaagtggtaccccttgatcccgtttctttccattcataaaagcatcacgcatcatgagtacataaaagccgataccaaaaccagctgttaacagcgcaataatcccctttgctaaaagaaaaacagagttgtcacgaggcagcatcgtcccaagtgtgaacagcccccagaagccaatattgaataaatcataaaatacaatcaaaaaagagacgccaaacaggaaaaagagtgcccctttgccgtactgtttgttgtatatctgccccatcccgggtataaaggagaacattagcgcccgtctccggtgtgtctttgattccactgtgtgtgtgcggtctagttcaaggttacccgtcacgtctaacacctacttcatatgaaattagatcaactacgggcagtttgatagactacccgcatttgatggttatttggagtgatttgctttaatttgagagtctatttgattgaccgcatcatcaaatgcctttttcacatctgtacgaccagttgcaatgagacctaatgcactatcaatcggcttccacacttctgccatttcaggattgttcggtgtcagcgtggcatatttcgtttgttttgaaacagcatccgcattagcgttttccgtaatgattgaatctttcatcagttttttcactggtggaatttcctctgtcaattcaaagcgtttcttcgcatttttttcgttcgtgataaattcaacaaatttctcagcaagttctttatttttagaataagaggagacgttgtagctctttacacctaagaaggagctcatatgttttccgttagggagtgttggcagttcagccacgccatagtcaatacccgcctttttaaatggaccaaatgaccatggaccagaaatgacagctgctgcttttttctctgtgaataaggagttgaggacattgattccttgttccccaatgatgcctttcgggaaaagtccttcgctaaagaatttttgaatgtattctccgccttggatggcgccatcgttgttcagaccaatgtcattaacatcataagagccatcgcttttctgcttgaaaatatagcccccagatccgcctaaaacactttgcgcatagtaaatttcatcccatttcgcaacaaagccgtactttccgtcttttgtcagctttttcgatagatcataccagccatcaagtgtcgttggtgcctttttgacaaggtctttattatagaaaagcaccgtcgtttcaacggatttaggaagaccatacagcttgccgtctaccgtttgtgattgaatcgattcgtctgtgaaggagttaatcactttttgatctggtttgatttcctgtaatagcccctcagtgacagctgatccaatttgatcgtgaggcatcgtgatgacgtctggacctgtcccagctgcgccatctagacgtagagcttcaatttggtcggcataagctttttcgaccactttgattttcacatcatgttgtttttcgaattcttttacagcgtcttgaatcccatcagactttttgacatcctcccacactagcaaggtctttgtacctgtagatgccggctgtgtaccgcttgaattgtcatctcccggtccgcaagctgaaagcagaagcacagcagtaccaacgactgctgataatgtcgcccattttccctttttcattggtaatcccctctcgttcttttttcacagatgataagaaaacgctttcttaatgtgagaatatcaacttaagtaaaaaaagtaaacatattttattaaatttattaagtaaaattttttactcatatagaaagaaaagaagccctccacattggacggggcttctagttgtttatatcgtacttttccgaaagacaggttctgaggcaatcagcacagttttaggtaatgctctgccgtccacaagtctttctaacagtaaatcgacagctgtttcacaaagtaaagacgtgtggatatgatacgtggtgagcggtggtgacacatattgagacacatgaatatcgttgatactaaagacgctcacgcggttcggcagagaaaatccgcgctcgtttaatgcttgtaagcagccgatggcaagaggatcactagcgacacaaaaagcggtgggcagatcatcaccaagctcatcaatcgccttcatcatcagcgaatacccttcatctactgagaaatgatgaccgacatagaccaatcgctcatcaaggacattgtgagccatcatatattcacggaaagtcgtttcgcgaatatctggaatatgcacattcgtattcaggtcaaggtctgtgccgcctacgaatccaatggatgtgtgttttttttcaataaaagaatcgatgatcttttcaacaattcgttttagatttggttttacagaatcaaaacggtcttcatccggtgacgtatcaataaaaacgatatgctgggtgattgcatataattgatcaagctctgacgttttaaatcggccgatggcgatgatcccttctgtagaaggatcaatggaatgaagcccatcagatggattgtaagcggtgacatttaaactccgagtattggtcagttcctcaatgcccagacgaatggatttgaaataaatatcttcaagctcttccttttcggtcatccaatagagaaaggcgattttttttaatgaatgtttgaatgttttcttttgataggacaaagcttctgcggcggcgtatactttttcgcgtgtttgatccgtgacagataggttgggatcttggtttagtacgcgagatacagtcgcaatggataatccagctttttcagcaatgtcctttattttagctgccaaaccagcacctcctatagaaaatatctcctcctagtatagagtctttaaaaaaattagtaaatatttttattaaattgttttcagttaagcgcttctttacgcactgggaaggaattagtaagatatatatatgaaaggttttggattaagatttctgataggagagggaccgatgtattacgatgcactgaagacatttgtgacagttgtggaagagaaaaactttacaaaagcagcccaaaagctgcggatttctcagccgagtgtcagtcttcatattaagaacttggagcaggaattccagaccgtgctgctgaatcgttcgccaaagcaattaacggttacaccaactggggatatgctgtaccatcgatcaaaacaaatcattcgtttatatgaacaggcgaagcaggatatttatgagcatcatcatctggcaagagggaagctgacaatcggggcgagtttcaccattggagagtacgtgctgccgcaaatattggcagagtttcatcagctctatccgcatgttgatattgaggtggtcattgataacacagaggctatcgccagacatgtccgcttattccatgttgacatcggtttgatcgaaggacagaccaatgacaaagaactaactgtcgaaacttttctagaagacgagctctatatcgtggcgccattagatcacccctttgctaagaaaaaggatgtcacgattgatcaattgcaaaacgaaacatggatcacaagagaagagggatcaggtaccggagaatacttacagcacgtcctgaaatcaaatgggctgaaagcacggacctttgtgacatttagcagcaatcaagcgattaaagaagctgtgatccacggaatggggctttccgttttatctaaatatgtcctccagcgaggcagcattggcggtgaattggctgtcatttctgtgagaggaatggatttcaaacgaaaattctcctatgtcgagtcaccaatgacagggggaaataaaaataaagaattgctcgttgaattgttaaggcaagagagaaaagacgcttctcctcagtaggagaaacgtcttttctttttttataatcctttgattttgatttcatcaactggaaggaagatttcacctgtatctgtgtatttcatggtgacctgatcgccttcttttaaataaatgacaagaggttctttttcagatgacatggtgtagcttttcccatcgtctagcaggaaggtgacggttgtataatcaccggtcttttctttatagactcgtttgacttttcctgtagcttctttcttttcctgcttagatgaactgttgacggtgccgccgcctttttgaagagctgtcttataggctctcaacgcttcgtttggtgttgaagcgtacgcagcgatttcaggattggctgcagaaacgataaagtagttttgcaggaatccatttgaatcgagaaccggtgtgagccagctggcttctccatagaaattatagagaatgggcatgcgccctttccatttcttctcgatgaatcgtttttcaataatttgcagagcgccttgagaatccatgtaggactcttcaagattaccggtataataagtcgcttttcctgtccgggcatttgtcagggcatacccaagcatcgaatcaacgccctctttcggacttgtgaaatctgagaagtaatacatatctccttttgaatcaaacactggacttacattggcttctgttccttcatctgaaggcagcttcacatctgattttccaaacatactgttccagaacccgtgaatatagtttccgaaataactgttttgcagactgaccgcttctggtgaaacagcaccatcaataaaagcaggtacttgatctagagcatatttcttcgttgcacctgttttggcatcaacaacgactacgccggaagctttaaagccgtttcgggcagagataaaatcgccatacgtgcgaatgtaataaggcttaccatcatcattgatttccagctgggtgtcgccgtagaaaatcaaatcagggtactgaagccggatatgccgctcaatttctttgttgaaataagaggaaggtgtgtaaaccatctctgttttcacaaactttggattagcagatgagtcggtcgcacttaatgtaaagtaacccggcgtactccccgaacgaatccatttaaagaagtccgagaactccactggggcgatgtacacatactcaccgttgaccttctggatttgcaggctgccaagctcatagtagcttgtgtttggaacctgtccgaacgatttcttcattttgttccgagcaaattgaggcggtacacttgcaggtgtttccgtctcatcaaacgctttgatttccaccttttgttccattttggagacatcaaatttctcattcgcattgaatagaaaagctgtcgccatataaacaccgagcagtaatagaataagaaacagcacgcctttgatcttacgctccaatccaactgacaaaaaggcacctgctgctgtcacaacaagtccaatcaaccatagggatgaagggttacgatctaaattggtgatgtaatagaaaataaaaataccgaccatgaacagcaaagcaaggcctgcaatccacataagcggaacctgctgttctgttcctttctttctaacgaacaatctgagcggtgtgagcaaaagggtcaaaatcagaccgatcacaaccgaaaataacaaaatatatcccacaaacagatctcctttcaaatcaatcactcttttagtatatacgagtgagacggggaaaagattcataagaatcatacagataaggtttataaaaaaatgagtttaaaagacacttatatatcggaaggttaggtgaagttttccttgcgctatatgattagattatagtgaatattttgttatgtcattcaaatatatcattttccttttctaattatttttactttaattgtatcgttattctcaccgtctgtaacattccatattaatcgagaggcttcttcaaatgacaaaagtgtacaaattggttataaaggagccgatgctgtatggggtcttgtcatccgtactatttttgtagactaaaaaagttacagtaaataataaaaaattgttatcggagttaaaacagattgaaggagggacttggaaaaaagtatataaagatggctataaagacggaaaaaaggtttctgtacattattttcaaagtaaatctggtttggtgtatgatgtgaaagttaaaaaaggttggagtgtgaaatgatttatgaataaaatagaactaagatattcttcacatgaagatttagataggattattgttataaatatcattggtataatcatatcgctaaaagaaggtttaatcactatagaagaagcggaaaagctcatgttcagtccacgaacaatcgatgttttaaaaaagaaagggataaatgaagaactgataaatatacttcatttgggaacagaacttgaagatgtagaaagtttaataccacatgaattaagtgatagtttagaagaaataagggtaaaatgcttaagatttttggaaagaaatatagaaaatgaagttgaaaataatgtggtagattgttgagctaaaagtgtatattataaaattttgagtaaatcttttttgatttattgattaaaacgatgaattcataaaaagagaagtctgtgcaaacaggcttcttttttataagatgggaacatgaggaaatgtatgcgctaacaagaatgggggaggagtgaagtcaattggcttctgttaatttaagtagtattgaaaaaatacgagcagcaagcaggggattgccgccaaagctgaaaggaattgcagaacatattacgagtgagccccgcgacatcatccatttgtctattgtcgagcttgcgaaaaagacagcgagctcagaggcaacgatttttcgtctttgtaaaaggcttggatttgagggctttcaagatttgaagattgctattgcccaggaaatagaccaaacaaagcctaattatgtagatgaagaaatgagtcttgatgatgatacagcgatttttatgcaaaaggtttttcaggcgaatatatccgctttaaaggatagctttcaattgttgaatccagaggatgtagaaaaggccatacaaatcatacatgaagcgaaacgcttagagttttatgggagtggtgggtctggactcattgcaacagacgcttttcataaatttatgaggacaggtatcaactgtattgttcacacagattctcactttcaagcgatgtctgctggtctccttgaccagcacagtacagtgatcggtatatctcattctggacgtaataaagatttactcgatgcgatgaaaacagcaaagggaaaaggagccaaaaccatcggcattacaagctatcagcgctctccattgagtcagcttgcagatgtcacgttgtatacagcgacgcaagaaacggcttttcgaacagaagcgatgtctgcaagacttgctcagctgactgtcattgacgttctatattttgcacttgctcacttaaggcagcaggaaacaataacaaatttaaagcaaatgcgagaaaccatatcacaaaaaagggtgtaatgattccaaaaataaatttttctgatgatgaaaaatgctgctatggtaacgattgtgagcttttggatgaaaataattttcttttcggtcgttgaatgtcgaaaaaattatttttataatgggatttaacaggtatatcaaaaacttcatatctgatttcaaatcaatgattgggcgtgatacagatgaagggaaaccaggcggtaattggtttggatattggaacaacaagtacaaaggcggttctgtttggaccacaggggaaagtaataacgaagcattcagtaccttatgatctcattcagccccagccagcatgggttgagcaggaccctgaaaagatattagaagccgtcattgcgagtgtaagaggtgcattgacgacagcagcatttgatgtagcaaatctcatcggcatcgggattagtactgcgatgcattccttaattgtgatggatgaggatggcaaggcgttaacgaacagtatcatttgggcagataacagaagtgcagaacaagcgaaacgaatcttatcagatatggatggcttccacatttataaaaggacaggtacaccgatccatccaatgtcaccgctttcaaaaatacgttggatcaaggaaatggcacctgatctcttcaagaaggcagcgaaatttatttctatcaaagaatatattctatatcatttcttcggtcagtatgtcgtcgattattcaatcgcttcagcaacaggtctgttccatttggaaacgcttcaatgggatgaacaggcgcttcgtattgctggaattgaagccagtcaactgtctgaacttgtcccaacgacgtatcagctgagaggacttcagcctgagattgcactgcgcatgggcataaaagaagatacaccatttgtgattggtgcgaatgatggcgttctagcgaatttaggtgttggcgcgattggaaaaggagaggtggctgttacgattgggacaagcggtgcggtccgtacggttgtagacaaaccaatcacagatgagcaatcaagaacgttctgctatgcgctgacagataaacattgggttgtgggaggaccgaccaataatggcgggatcatgctgagatggctgaaggatgaatttggatcttcagaggtggaggtagcaaagcgccttggtgtggacccttacgatttaatgatggatattgcggaaaagattccagcaggctcagagggactgctgtttctgccatttttatcgggtgagcgtgcaccttattggaatccaaatgcgagaggcaccttctttgggatcggtcttcagcataagcgggagcattttattagagctgtgttagaaggcgtcattatgagtgttttctcgattggtgttgccttaagagatttaaccggttctgcaaaggatgtcagagcttcgggcggatttgcacgatctccgttgtggcggcaaattttagcggatacgatgggcagagaagtacttgttccagaaagttatgaagcgtcagcacttggggcggctgtcctcgcacttcatagtttaggtcatatggaagagatagaagaggttcaagagtggattcgaatttctgcccgtcatgaacctaatatgaagaacaatgaaacttacatagagctattttatttatatgagcgtctctacgataaactgaaggatgaatttgatgtcattagtgcgctgcaattaaaacaaaatcgttaaacatcagggaaaaggtgggagaacatgcttttattcatcgtgattgcggcgattgtccttttactcattctcattacaatcgctaagttgaatccatttgtgagtttaattattacttcgatgctagtgggttttgctactggaatggatttgcaggaaatcattcaatcgattaaaacgggattaggcaatacgttatcattgctggcaattgttctagcgcttggtacaatgcttgggaaaatgatggctgaatcagggggagcagagcggatagctcaaactttaatcggccggtttgggacgaaaaatgtgcattgggcaatgatgtttgttgcctttatcgtggggatacctgtctttttccaggtcggtttcgttcttctcattcctttactttttacaattgctattgaaacaggcatctcgctcgtgacaattgggctctcgttaattgctggcttgtctgtcgtgcatggactagtgccgcctcatccagcggcaatggcagccgttggcatctatcatgccaacgtggggaaaaccattttcttttctataattgtcggattgccgacagcgattattgctggaccgctgtatggtaagtggattggaaaacggatacataaaccagttccggagatgctgagaaagcaattcactgaacgaaatgaagatcgaaggctccccggctttgcgaatacgatgtttaccatattggtgccggtgattctgatgcttcttgccacattggcggacattatcttaccagaggacaatatgtggtttcaggtattcaagtacatcggggatccaattacagcactgctgattgcaacggtgtattctttcttcagtcttggctttatgcaaggaatgagccgtgaccgagtgctttcatttagcaacgagtgcttaggaccaatcgcttccattttgcttgtcattggagcaggcggggcttttaataatgtgctcattgattcgggcgttggtgattatattgcagatgtagccaaacactcgccgatttcaccgattttgctaagttggctaattgctgcggtgattcgtgtagcaacaggatctgcgacggtctctatgatgacggcagcaggtattgtagccccaattgctgcaactatgccggatgtgagcagagagctgcttgtgttagcaacaggagcgggttcgttaattttatctcacgtcaatgactctggtttctggctgatcaaagagtattttggtatgaccattaaagagacgtttttgacatggacggctatggagacgatcatttccgttagtgctattgcatttattatgatcattaatatgtttatatagcgaacaacagcctggttctttggaattgggctgtttttgcttgttgtgataccactttcttcagattggggtaaaataatgatattgagatgtgggaggcggacacgatcgaaccattaaaacatgtgtaccatgaattatttattcaagaattagcggagaaacttgtacaggcttcgactgtatttgatgctgagcaattccagcggctcgtgcttcaagaggattggcagcagcttgagttaaaaggacggatgagaagagtcactgaatcgatgcatgcctgtctgcctgaggattataagcaggcaattgaggtactgcgtcaggcagcgccgcatttttcagggcttagtgcgctcgtatttccagactatgtcgagacatatggccttgcacattgggatctctcgatcaaggcgctcgaattcttcacgcctttttccacttctgaatttgccgttcggccatttctgattcaagatcaagacaaaatgctggcgcaaatgctcgtatggtctcaggatcaaaatgagcatatacggaggcttgctagtgaaggctgcagaccgcgtctgccatggggcttatctgttccttcgcttaaaaaaaatccttcggtcacactgccgattttggaaaatttgaagtctgactcggcgcggtatgtgcaaaaaagtgtagcgaaccatctaaatgatatctcagcaattcagcctgatctgatgaagcagacagttcaaaactggtatggaaccaacaaacatacgaactggattgtcaaacatgcatcccgtactttactcaaaaaaggagatccagatatcatggctttgtttggctatggagacgatccatccgttcaggtaacggatttgaagatagtacaagaccctattcggatcggtgagaaaatgacttttcattttacacttcaggccgataagccgctaaagctgcgtgtagagtatgccatagactacgtcaaagctcgggggacccgcaatcagaaggtatttaaaattacagagtttgaaagaggctcagcgttacatagagaattcgtcaggtcacagtcttttcaaaatatgacgacgagaaaacattatgagggaacccatactttatcgattatcatcaacggtatcccaaaagcgtcggttgattttgatgtgacagaagtcagcagctcatgaaaaaaacccgccattaggcgggttttggcgtttaagccttctttttcattaagaatgaagcaatgatggctgcgactaagaaaccgatgctgataatcgagctaggcaagttttctggtctgaatagaaacatcacaaaactcacacttagtacaagacctgcaaataaagtcaaatacggaaacagccacaccttaaaatacggctcctgtggatatttcgggcgaagtttcagatgtgccatgcaaatgctaatccaaatgagtgaaacagcaaaaccaggaatagccagcatatagctgaaaatttgctctggatataagtaagcaaagaatgttccgatgagaagaaacagaacggtcacccataaactcaaaatgggtacgcctcttttattgacctgtgccagctttttcggaccgccatctgatttagaaagagaatgcatcattctcgtcgttccataaatgccagaattggccgcagataaaacggctgtaatcaatacaaaattaatgaagtgagaggcgccttgcataccggctgctgaaaagacttgaacaaatgggctgttatttggatcaatttgattccaaggaatgagtccgcagatgatcaaaatcggcaaagtgtaaaataagataatacgccacatcatacttttaacaacaccaggcaagaccttctctgcatcctttgtttctgtaatggtcagcccgatcaattcagagcccccgtaagagaagataacgactaataaagatgcaaagatcgcaccccatccgttcgggacgaagttttgatagttggtgagtgcaggtgtgctttgttcgttcggaatgatcccaaataatagggctgcaccaagaataataaacacaataataacgaaaatcttcattccagcgaaccaaaactcaatttcaccaaagtattttacattatttaagttaattccgatgactaagagtgagcagagtaaacatagtgaccatagcggcacgttcggcatccagtattgaagcaagctgcctgccgcgataatctcaatgacacacacagtgagccacatgaaacagtaaacccagccgacgacaaatgaaaaacgttgaccaagcgcaatctgtatcaggtcgcgaaggttatttcccggatagacaatcgccatttcagctaaggctgccatcacgatgagcaataataatccggcaaatacataggaaaagatgaccccaggacctgctaaaccgattgtatcggcacttcctttaaaaattcctgtaccaatgaccccgcccaatgcaatcatgcgaatgtgacgcggtgataaaagcttttttaattcttgttgttcctgattcgcgctcatgacgttctccttttttaaaaatgcttatgttccattttcttttttcgggacgtcagtgtcaatataaaaaaagagatttttcagacaaaaaaggcggttgtttctttcaaatgagccgtttttttccataaattctttccacgacccatcaccaaaatctgaaacttcgagaaaaaatgaacatttgccttcattctgacataaacaattttcagtttttgtcgatatatcttttgtaatactaaagtcctaataaagaattgtttataactgtaaaatatttcaaaaatgtatgaagaagtgaaaggagttatgaaagatgtttatgagaaaagcaaatgattcgtcagcgggaacccttttaaatgaaagcagtcgattagtagaacgaattgagaagggagacctttcagcaagaatagatactgctgcattctcttcaagtcaaacgattgaagcagtagcccaaataaatgaagctttgcaaaagatgcaggaagtaaatgaagatattcaaatgcggatgaatttagtgacaaaagccattcaagttggtttatgggatatgatcgttgtcgctggagatccggtcaatccaaaaaatgagttcacatggacggatgatttccgcaaaatgatcggctttcaaaatgagcacgattttccaaatgttttagacagctgggcatctcgaatccatccggatgaacaagaatataccttaaatgcattctcttcgcatttattggatcattcgggacatacaccatatgatatcgaatatcgcttgaagttgaaaaacggagattatcgctggttcaaagcaactggcacgaccattcgtgatcgaaatggtgtccctcttcgtgtagcgggagctctttttgatattcatgatcagaaattgaaagaagaagagctgcaagcattcgtgacgagatatgacttgatcaaccgtgcgcttgtggaagctccttgggacatggtcgtagaggccggcgatccagtcaatccgaataacgagttctggtggtccccgcagttcagaaaaacgcttggttttacggatgaaaaggatttcccgaacgtgttaagcagctggagcgatcgcctgcatcctgaggatcaagaaaaggctctccaagcttttgcagatcatttaaatgatcactctggacgcacaccatttgacattgattacagattgcagagcaaaaatggcgagtatcgctggtatcatgcaggtggtgaaaccattcgtgatgaaaaaggtgttcctcttcgtgtggctggaaccattcgtgacatcacgttagagaaaaacaaagagaaaacagcgaatgaaatggcttcacaagtagaacagctttcaagttcgatcagcgagatggtatcaggcatcagctctgtgacaaaccaagcgcaagagcttgctgtcgcacaagagcagtcaacatctgctgccaatctagcaaaaaatagtgcagatgagacgaaaaatatttctgacttgatcaaagaagtagcgaaccaaacgaacctgcttggtttaaatgctgcgatcgaggcagcgagagctggtgagcaaggaagaggattctcagtcgttgcagatgaagtgcgtaagctggcgcttcatagtgccaatgcaacggagaatatcgaatctagtttaacagaaatgaaaacacaaattgatgaaattcttgaaaatatctcgaacatgacagctcttacacaaacacaggctgctttaacagagcaagtaaatgcttcagtcgatgaagtgaaccacatgtctcagcgccttgtggcctattcaaagagtatttaatcaccaaaaaccgccctctcatagacggcggttttttcattaaaattgatctgctgggaaaacaatgcctgcatcttttcttgcagcttcaaggactttcattacagagagactttcatcaagccatgcatagcactgttcataattttttgtttcaatgatgtgctgaaaagcttctgtttcataaaacagacggtttgaatttgtttgtgcattgagtgaggtcacctgatcattcacatgaagtaacacttcctcgcagccattcgccccatttttcacatgaatgaagcctttttctccttgaatcaatgcaaaattcatgctgcttgtatccttactgccgacacttgtcgcaatgaaatcattgtaggtgaaagtcaaaacaccagatgtatcgatgccatttgggtgacggtttgcctggtagcggacctgttctggtgatccgaagaggttcatgatgaaatggacattatagatattaatatccatcaacgctcctccggagaattcagggttaaagacatttggcgtttcgccggctagcagctgattatatttgcttgaatattgactatagttacattgaaccagtttgatttcacctaattgatgaagatgctttttaatcaaatgatagtttggcatatgaatggtcgtaatggcctcaaataagagaagctgcttttcctttgcgagtgcgattaaggcttccagctcttttacattagaggtgaaaggcttttcgcaaatcacatgttttccgtgttccaatgcagctgcggcatgctcgctatgtaaacgattcggtgatgcaatataaacggcttcaatgttcggatcttctagcatagccgttaagtccgtataagttgttttcacaccaaattggtctgcgagcttctttgccgttgcttcctttcttgaatagacggcatgacaagaagcgccttcaagctgttcaatcgcttgcaagaagctttccacaatcacacctgttccaatggttgcaatgttcattctactcaaaaccccttccactcgtttgatatcaagtaaagctgtctctagtataactgatgtttgaattgcacgtgcacttgagacttgggcggagaggggcgccagtggcaaacaccggcacatctttggcagcccttacaattagctgatgttcgctaatgtttgttttgttaacaattgaatggcagccttcctcttttttaactcttgaatggagtgttgaatatcctcaactttttgttcgagcagctgttcagcttctgtttttgattgtttttcaaatagtgatttaataatttcgcgaatttctttgagtgagaaatctagctttcttgcttctgtgataaaggaaagcatgagtacatattttttatcatataaacgatagccgttatgtgctctctttggttcggggagcacaccctcattttcgtaaaaacgaatggtttcaatatgcacaccagacagttttgacaatttacctctagtaaacgtaatcattccctgcacctcctttctttgctatccatcatacaattagatttgctagtttcaaaatgttcagtggtgaacatttgttttcatttccccattggaaaagggcagaaactctgtttaaagcaggatgaatagaatacgatataatagagtaggcagatgacaattttgttacaggtgagaacaagtagacagcgtgatgaaaaaacgataggctaaaataggtaaatagtaatgatataacctgtcatcatatagatgatggctcaaaatagtgacagcacgttttttgctgagaaaaggggaccagtgaatgtataaattagttgcaattgatatggatggtacgttattaaatgatcaacatatggtgccagctgaggtgtttgaggccattcaacaggcgaaagcagagggagttaagattgtattatgtacaggacgacctattggcggagtgaatcgctatctagatgatcttcagctcaatcaagaaggagactatgtgattgcctacaatggggcgcttgtccaaaacagtcatacaaatggagtggtgtcagaactgacgttatcctatgatgatttgacttctttatatgagctgagccgtgagcttgatacaccgatgcattatttcgattccgctcatttgtacacaccgaatcgtgatattagtgaatacacagtacttgaatcttatttaacaaagctgccgcttaaatatttacctgttgaagaggcagatccttcaatgagacttccgaagatgatgtatattgatcagccagaacggttggaaaagacgatacaagccattccatctgaagtaaaagacaagtacatgatggtgaaaagcacagatttcttccttgaaatcctgcatcctgaagtcagcaaaggaaacgccgtgaagcttctagcgaaagagctgggaattgctcgtgaagaggtcatggccattggtgacaatgggaacgacgtatcgatgctggaatttgcgggctgcggcgttgccatgggaaatgccattgatgatgtcaaagccgtagcggatgttgtgacaaaatccaataatgaagccggagtagcacatgtcctgcatgagttagttttaggaaaataaacaaaaaaggcggtctaccagtgaggtagccgcttttttatatgtgagagaaaaagtaaacaagcatccgtctgctgctcaaatttgtcttttgcagcatcgccttcacatgatcatggacggtatgggttgaaataaataaagtactggcgatttcctttgtagactgtccctttaataagcagtcgaggacgttcatctctctttctgtcagccggtacgtttttgccgcataaggaagaatatcatttgtttgggctctcttgatgtgaatcatgacagcctcttcctgcccggctgcctgtgctaatcgaaatgcttgaagagagaggaacagccccgttggcattctcgtcatgattgccgctgtttggtcgataccgccgtataaaagtttagcccctaatgctctgaacgggcgcggcatggtcgccttgtcatggatttgttcaaaggcttgaaatgtatgaagccaatgaagccctgtctcatttccataaagaagattgtaatcgtgtgagagaatgaggaaaccttgctgctccgctgcgtcatcctcttcagtatctcttttcttgaaaagttcatctcttagcttggctgcgagtctgggcgtttgttcgaagaccgctcggatatcttgtttttgaaaaggttccttgtcctttagacgatataggctggcaataccccagcattctccttgaatcacaagggctgcccgcaattcatcagaccatcctttaggcaacaaaatgtctctgtagcgatcactgttgagatattccccgctttggactaagctcgcagcatgaatagggcctttggctagagactcatgttgatgcacgtccttttttaagaactcattttgaaacagctgatcatgaatttcttcaatcggttcatctgtgaaggaacctgtcgagaggagagtggctggatcaatggtcgtgatacaggcggcatcaaaatcaaggacggcagcaagctcgtcccgaatgtgttgtctcagctgctgaaaatgagtggctggattggtcacatgatctcctcctcaaaaatccccacttttagggatcgtgttttttgatgtctctttttacaataaagatgtcataccgttagtgtacaggaaacgatgtaaagcggaaaggaactggaggagaaggacatgaaaggaaaccagcattggcacgatcccgtagctgaatcatacgcagccacgattgctcataaagtacccggctatcagctattgcatgagttgacaatagacgtattagaaactgaagtaaagggagcggcttctcgcattttgactgttggagcgggcgggggcgaagagatcatcaacatgctacaaagaaaagaagactggctgatcacaggggtcgatccgtcaccttctatgctggatatggcgaaacggcgagttggacagcttcagatggaggcgcgtgttacatggcatgagaccgtattagataaggtttttgctgaacctgtttacgatgcagcgatgagtttgcttgtgattcattttatagaaaggcgccagccctttttagaggagattgcccgcaggcttcaaccagatgcaccgcttgtgttggcatttatacagggagagatgaagtcccatacatttcaacaggagctttacatgctttctcttttcatgcagcggcagggtctagaaaaagaagtgtttacatcctttaaaaacaggctgggacacgcgacacaccctgttcctgaggaagagataagagagcatttaatcaaagcgggatttgaagacatcagaccttattttcaggcaggaatgatcaaagggcttgtttgcaagcgaggtcgtagagaggcggatgagaaatgagatcacaggtgatggtgattggcggctatggacatgttggacagcaaatatgtctgcagttaagtgaagtgtatccgggacaaattgttgcggcaggcagaagctatgagaaggcagagaaattttcacgccagtcaaaagggaaagttcgtccttatcaactagatgtcagtgagccgctatattcggactggatggataaaacaaagctggtgatcatgtgtcttgatcaagaagatccgtcatttgctgaagcagttctgcggtcaggcattgattatattgatatctccgcgaaaggggcgtacatggagcaggtggcaaagctggatcagcggcacatcggtgcaacggctttgctcagtgtcgggcttgcgcctggccttacgaatttattggcagcgaaagcagcatctatgctctcatcagtgaatcaaatagatatagggattatgcttgggttgggtgatcagcatggaaaagccgctattgaatggacgcttgatcatgtccatactgactatgtgcttactaagcatcatcagcgtaaaagagtcaaaagctttactggaggtaaacggatagactttggtggaagtcttggaaagcggcatgcctatcagttccccttctctgatcagcagacattgccttcaacgctccgcgtgccttctgtgacgacaaggctttgttttgattcccgcgcggcgacgcgtgcatttgccttcacaaggagtctcggaatgacgtcccttctcactgtgccgaaaatcaagaaacgagccatttccatgattcaatctgctcaaatgggaacagatcaatatgcagtgaaagtggaggctacaggaatggatgggaacaagattcatcaagcagcgcttggaataaaaggacgcgatgagtctcaagcaacagctcaagtcgcctctgctgcggcattgcatttattgagcaggcggtttcagacaggtgtttttcatatcgaagaagtattttctctagcgtatgagaacggtgattttgctttggtggatcaaacaacgaaggaaaagcgggtgttagcggttagagccagccttttgacggaataaaagaagactagcaggatgctagtctttttatgatgaagatgacacatctccttttttcttgatgctcgctgtaatgagctgtgtcaatgtgtcagagccttttgttgaaaggtgaacaccatcaggctgaaaataagatggctgtccggtggcggctgaatgccaatcgacaagggtcacattggaatgttgatcggccactcgctgaatgactgcattcacatcattttcccaagaccttgggactctcgtgttcacaaggaaaatgtgcgcctttgaaaattgttgaatgaatgctgtcaatgtgccctcagtaaaatagccattcgtgccaagctcaataataacagcggcatcagattgattaaatgaagcatattgaggagcgatgctgacggcttcgttcatttgtctgccaacctttgcatcgatggtgatttgtgcatatgctttttcaagattcggcgcaatgtccagcatgacggaatcaccaatagcaagaatttggtgaaactgtttctgatctgctgctttcttctcgtgtttttctttctttttcttagcttttggttccgcagagtctcctgcttttttcggtgccgtcttaatttgtgtcacttccttggcatgtggggacgtatgggacgaactggacatgccaatggtaaataagatcaaaagagctgctgcgattccaaggaacactttatgagacgtagaccattgtttgaatccctttttccaaatagaccaagaggcaaaatattgtctgaagccaagccggcgaatcggctgttcgatgaagcggtaagaggcctctgcaatgagtaaaatggccatgagctgcaatgcgacacgccccatagaaggctgtccaatttcaatgacaggggtagtcagcacgatgatgggataatgccacaggtaaataccataagaacgctttccgagccagacgagcggctgataggagagccatttccctaaaagacttgcagggtggcagatgcacgcaattaaaatcgctgcatttagacagaataaaagcatgcctccttgatagagaaagtcgccaaattcgtccactgcataaacacacaaaagaaaaaccgcaaacgaaccaaaaccagcgatatgtaaaatacgtctgccaacaggaagtaactttttgctggacagtctttgcatgggccatacaaatgccaggctgcacccaatcaggagcgcaaatgcacgagtatctgttccgtaataaactctgcttggatccgtatctggtgaataaagaatcgccatccataaggcggagacaagtgcaaggccaaaggtgatcattggcagatgggatctatttttcacccattttagccctgcaatcaatagaatcggccaaatgatataaaattgctcttctatcgccaaagaccacaaatttttcagtggagatacagcgttgaagctatcaaaataagacagctgatggaagatgtaccaccagttactgacataaaaaaaggacgataaggcatcgccacgaatggacaatagtgcattcgaacccacaatcgcacaccagctgacggttaaaaaaatcatcacgtaagcagctggaagaagccttctgatccggcccatccaaaatggtaaaagctcttgatagcccagatcctgcttatgtaacaagatcgtcgtaatcaagtatccagaaatcacaaaaaacaaatcaacgccaagaaacccgccgcttgcaggtccgatatgtaagtgataagcaatgactgccaatacagcaacagccctcagcccatctaatcctaatatataacgtaaacgattttccttgctgttcatgaaaatgaatcccccatttatgtcaaaacgcttcttttttgttgtcattccaaaagaacaacgattcttttattttatataagattagacggatcagcatcacattttgttggcgaatttctgtctttttttaaaatttttatataaagaaagaattgatggcctggaaggctgccttatttttatactcaaaaccaaaatccctgtcataataaaagaagaaggaaaggggatgtgtggaatgagaacgattgaaaatgatcagttattgattcaggtcaatgagagaggtgctgaggtcagagaggtgcttcacaaggaaagtggacgtcactatatgtggtctggcgatcctgcttattggggcagggtgtcgccagtcttatttccaattgtcggacgattaaagaatgaccaatacaagataggtgatcaaacctatgagcttgcgcagcatggattcttgcgggatgttgattttgatttatatgaagaaacgaaacatacggtgacctttcaatatgaatcaaaaggccgccacatcgagcagtatccttatgaatttaccgcccgtattcgatacgagctgtcggaaaatggtctgacgatttcctgggaaattgatcatgacggagatgacacgatgtatttctccattggagggcaccccgcatttcatgtcccgcttgttgaaggtgagcgcacagcagattactacctgacattgaccccttccactgagtatcttcctgtccaatatgaactaaaaaattcacttgtcagggagaaagaaaaaggcattcaacttgaaccgattcagcttcgaccagagctttttcagcatgatgcgatgatctatagccatatcaatcgagtgtcattgatttctcaggcaggtcacggggttgaggttgatctcactggttttccgtttgttggtatttggtcaccttataataaagaaaaaggcacaatggctccatttgtatgtattgagccttggtacggtattgccgatgttgaaggggcgaatgggcagtacaaggaaaagttcggtattcaaactttagagaagaatgaaaccttccaagccgcctatacgattttcttcaaatgaacatttgtgcatgataagatgaacattttgttatgatagaagaaaaaaggaggcgtacgaatggatcgggagaaacaacaactgagtattgaagcggcaaggctttattatttatcggattacagccagcaggaaattgccaaacaactcgacctgtcgagaccaactgtgtctcggctgcttcaatatgcgaaggagaaggggtacgtccagataacggtaatggacccatttgaagacttaaatgagctatcttcattgctcaaggaaaaatatgacctgctcgaagctcatgtggtgttttcgcccaaagatgattatccaactattaccgaatacttgagccaatttggtgccgagtacttgcaagacacagtgaaagacggtgatatcgttggtgtgagctggggaaccaccatgtatcaaattgcccaaaagatgcaacctaaacaggtcaaaggtgtggaggttgtccagctgaagggtgggatcagccactcccatgtgaatacatattctgcggaaaccatccagctgtttgctgaggcctttcaaacagcaccgcgctatttaccgcttcctgttgtatttgatagtgctgccgtcaaggagatggttgagcaggacagacatattcagcgcatcattgaaatggggaaacaggcgaatattgctgtgtttactgttggaacggtaagagatgaagcacttttgtttagacttggttatttccgtgaagaagaaaaagcgctgctcaaagcatccagcgtcggagacatctgttcgcgcttttatgatcaggaagggcgcatttgcagtgaagcgattaacaaccgcactattggtgtggagcttgatgatttaaggacaaaagaacgctccattcttgtcgctggcggacatcgcaaggttgcatctatccacggggcactaagaggaaaatatgcgaacgtattgattattgatcagcatacagcaaaggctcttttaaatgtcacaaaatagatgaacaaaatttcataactatgtttacaaatgttcatcggtcatatatgatgaaagtatcataattaaaaggaagtgtaagcatgacgatagcaaagctcattgatcatacagcactaaaaccagatacatctagagctgccattatgcagttacttgaagaagcaaaaactcatcaatttgcatccgtttgtgtgaatccaacttgggtatctcttgcagcgaaggaactagcaggaacaggcgttgatgtatgtacagtcatcggtttcccgttaggtgcaaacacaacagcagtgaaagcattcgaaacaaatgatgcaattgaaaacggtgcaactgaagtggacatggtcatcaatatcgcggcattgaaagacggcgaatatgatgcagttgaacaagatattcgtgcagttgtagacgcagcaaaaggcaaagccttagtgaaagtcatcattgaaacttgtttattaacagatgaagaaaaagtcaaagcttgtgagctttcagtaaaagctggcgctgattttgtgaaaacatcgactggatttagtacaggcggtgcaacagctgaggatatcgcattaatgcgtaaaacagttggacctgacattggtgtgaaagcatcaggcggcgtgagaacaaaagaggacgttgaagcgatgacagctgcaggcgctacccgcattggtgcgagtgcaggcgtttctattatcaaaggggaccaatcagctccttcgaaagactattaattcatacgatcctatggtaggataacattcgtgactcataaatgatgaaaaagtcatatgcggaaggatctcacttctgggaatttcttccgcactttgtttactaaatagggtttgttccatacaagcgcattaatgtaaacgaattcattcgaggaggaaaaacatgaaatacttgattggtatcatcggtttgctggtgattctcgccattgcatggctggctagtaacgggaaaaaacgagtaaaattccgtccagtatttgtcatgattgtactgcaatttattttaggttatattctgctcaatacaggtgttggaaacttcctagtcggcggctttgcaaaaggattccaaatgcttctaggctatgccggcgaaggaatcaacttcgtatttggcgggttaatgaatgataatgcgtcaactttcttcatcaacgtcttactgccgatcgtctttatttcggcattgatcggtattttgcagcattggcgtatccttccgcttatcgtacgcggaatcggttatttgcttagcaaagtaaacggtatggggaaactagaatcttacaacgcagtagcgtctgcgattttaggacaatcagaagtgtttatttctattaagaagcagcttggattgttacctcagcagcgtctttatacattatgtgcatctgcgatgtcgacagtatcgatgtctattgtcggtgcgtacatgcaaatgattaaaccagagtacgtggtcacagcacttgtgctgaacctatttggtggatttattatcgcgtctattatcaatccatatgaagtagctaaggacgaagacatgctcgaagtcgttgaagaagaaaagcaatccttctttgaaatgcttggcgaatatattatggatggtttcaaagtagcgattgttgtcgctgcgatgttgattggattcgttgcattaattgcgatgattaatggaatctttacagctgtcatcggtgtttctttccaagatgtacttggatatgtgtttgctccatttgctttccttatcggtgtaccttggagcgaagccgtacaagcaggaagcattatggcaacgaaaatggtatctaacgaatttgtggcaatgcttgctctaaatggagatagcgtgcatttcagtgctcgtacagaagcgatcatttctgtattccttgtgtcatttgcgaacttctcttctatcggtatcattgctggagcagtcaaaggcttaaacgaaaaacaagggaacgttgtcgcacgctttggattaaagctgttattcggtgcaacacttgtcagcttcttaacagcaggcgttgtcggtttgatttactaatttaaaaaaaggaatggtgaaaacaatgagaatggtagatatcattgcgaaaaaacgtgacggaaaagaattatcttcagaggaaatttctttctttgtcaaagaatatacagacggaacaattcccgactaccaagcaagtgccttggctatggcgattttcttccaagatatgacggatcaagaacgtgcagacttaacgctcgctatggcgaactcaggagacacgattgacctgtctgccattgagggcattaaagtagacaagcactcaacaggcggtgtaggtgatacaacaacgcttgtacttgctcctcttgtggctgcacttgatgtacctgttgcgaaaatgtctgggcgcggccttggacatacaggcggtacagtggacaagcttgaagcggtaaaaggcttccacgtagaaattacaaaagacgaattcatcgagctcgtgaaccgtcataaagtagcggtcattgggcaatcaggcaacctgacaccagcggataaaaagctatatgcccttcgtgatgtgacaggaaccgttaactcgatcccgctcattgcaagctctattatgagtaagaaaattgctgctggcgcagatgcgatcgtactagatgtgaaaacgggcgcaggtgctttcatgaaaacacctgaagactctgagaagcttgcaaaagcaatggttcgcattggaaacaacgtaggcagacaaacgatggctgtcatctctgatatgtctcagccgctaggattagcgattggaaattcccttgaagtgaaagaagcgattgacacgcttagaggcgaaggccctgaagacttaaacgagcttgtgctcacattaggaagtcaaatggttgttcttgcgaaaaaagcagagacacttgatgaagcaagagaaaagctaattgaagtcatgaaaaacggcaaagcacttgagaaattcaaggaattcttagaaaatcaaggtggagacggctcgattgtggatcagccggaaaaactgccgcaagccccttaccaaatcgacgttcctgcaaaagaatcaggtgtggttgctgaaatcgtcgcagacgaaatcggtgttgcagcgatgattcttggagcaggacgtgcaacaaaagaggacgagatcgacctatctgtcggcatcatgctgaacaaaaaagtcggcgatcgtgttgaaaaaggagattcactcgtgacacttcatgcaaatcgtgaagatgttgcgaatgtcatggaaaaaatttatgacaacatccgcatcgcagatcatgctgatgcaccaactctcattcacactgtgatcacagaataaaggaaaaaggacaaaagtgcttcgtcgcttttgtccttttttgttcatttctttttctattgagataaaaaatttcactttatgaaacaaacctcttgcaatcatcaaataatgggtgtatattagttgacgagtcaatgattgatatatcaactaattgatctgaatagaaaagaggggatggcattgactgcattttgctctgaagaagcagaggtattataccgtttgcagtgcgtgaaccgtatgatgggtgtgaagttcgaagcatgcacgggcatcagccaatcaagactagaattgctatcactgttattccaagccgacgaaatcagccagtcagatttgcagaaaaaagtaaatattgacagtgcggctgtgacgcgtcacttaaaacagttagaaacaaaaggaatggttacgcgcagaagaaagccagaagataatcgagtcacacttgttcgtctgacagaagaaggcagaacgagaatcgaagcttctaaaaaagaaaaagaacgatttatctcagaaatgcttgaaaacgtaagtgacgaagaacgaaagcttctcactgatgtgctcatccgtatacaacaaaacatcgaaaagattcaaacaacctaaaggagtgttgcaacatggctacaacattaaaaacaaacgattttatggaaattatgaaagggcgccgctctattcgtaactatgacccagctgtgaaaatcagcaaagaagaaatggcagagattttagaagaagcaacaacggcaccatcatcagtgaatgcacagccttggcgctttatggtcattgacagcccagaaggaaaagaaaagcttgcaccacttgcaaaattcaaccaaactcaagtgtcaacatcagcagctgtcattgcagtatttgcagatatgaaaagcaatgaatacttagatgaaatttattcaaaagcagtagagcatggctacatgccgcaagaagtgaaagaaagacaaattgctgcactaactgcacactttgaggttcttccagagcaagtcaatcgcgaaacaatcttaattgacggtggaattgtgtctatgcagcttatgcttgcagcacgtgcacacggctatgatacaaatccaattggcggatttgataaagaagtcatcgctgaaacatttggctgggataaagaacgttatgtaccagtgatgctgttatcaattgggaaagctgctgacgaaggttatgcatcttaccgcttaccgattgaacgcattacagagtggaaataatatcttttcaaaaggagacgatcatatgattattattcatgcagggatgaccattcatccagaaaaagaaaacgtatttctagaagaaatcaatgcattaatgaaagcttcacaagctgaagaaggcaatgtatcctacaagctgttcaaggatacagaaaaggaaaatacctttttaatggtagaagtgtggaaagatgacgctgcggttcagagccataatgcaagtgcacatttccaagctttcgtagcgaaggcaaaagaattcttagccgctccacttgacgttgttgcatttcaaggccagcagctttcatagtaaaacaacaaacaccctaggcggttatcgtctagggttcttttattttcgacaccttgttccacccatttcaatcccgtattgtgcattttccacaaagtttctgaaaataaaatgtttttcgacttaagtatattggaatatgctagaatgagatattatttattaccaaattagggaggaactaatatgaaaaaagggaaatggacgagcattgcactaacagctgccctcagtttaggcacattggcagctttcagcacccctctatctgcccacaccacagagaaatcaacatcctcagatggcggtcattattcaggtattccatttgacgcaagtgtcgtgaatgaagaccgtctcatcaaagccttgaaaaaacaaggaaagatcaaaaaaaatgccaatgaggcagaaacccaaaaagcattaaagaaatatctaaagaaaaaagaagaatctgccatgaaacaaagtgcaagcaccttaacagaagagcctgaatttctgaaagaatacaaacaagaggtacataacaaattagccaaaaagaaaaagttaaagaagcataaaggaaaagaagggaatcatgtaaaaccggtcaaaaaggaaaagtataaaggcgatgttcgcaatgataaggtattggttttattagtagattttaaagattataagcataatagtattaaaaaagaagagactgatatgtactatgacaagtacaatcaacagcactatcaagatatgcttttcggaaaaaatggctacatcggtccagatggtaaacgcaaagtatccatgaagcaatattatgaaaagcagtccggcggtagttacacaatcagtggaacagttgcaggatggtatacagctaagcatgaagcagcctattacggtggaaacgtaccagacgaatcaggcagtgacggcaaaccgcgtgaattggtgaaagaagtactcgaagcagcagcaaaagacccgaacattgatctcggtgaatatgatcaatgggaccgctatgatatggatggagacggcgtttataacgaaccagacggcatcattgaccatctgatggtcgttcatgctggcgtaggtgaagaagctggcggcggacaacttggctctaatgcgatttggtcgcaccgctggtcacttggtgatgtatttgaaattccaaacactgaatctgaagtcgggcaaggcggaaaattaggtgcgttagattacactatcgaacctgaagatggcgcggcaggcgtgttcacacatgaatttggacatgatcttggtcttcctgatgagtacgatacacagtacacaggcggaggcgagcctgtttcatactggtcgatcatgtcaagcggaagctgggcaggtaaagtccctggaacggaaccaacaggctttagtccatatgcgaaagaaatgcttcaaaacttgcatggtggtaactggcttactggacaaaccattgatggtaaaacattaaagaaaagcaaaacagtgctgattgatgaagcagcaacaaaaggaacgaatcatgatgcggttcgagtggatttaccagataaagagattgtggtcacaaaacctgctcaaggacaatattcgtacttcagcggaacgggtgacaatttgaatgcgaccatgacaacaacaggtatcgatttgtcgaaggggagcaaagcaaagcttacatttaaagcatggtacgatatcgaagaagattatgattatgcgtatgtagaagtacgtgaaacaggaactgatcagtggaagaccattgctggtaacatcacgaatgatcgaaatgaagcaggtgcgaacgaaggcaatggaattgacggaaaatcggacggatgggtagatgcagcctttgatctttctgcttatgcagggaagaaaatcgacctgcaattccgctatacaaccgatgcaggctattcactgccagggttatttgtagatgatttaaacatcacagcagatgggacgaaagtgtggtcagatgatgccgagggcacgtctactttcacctttaacggattctcaaaatctaatggaaaacaatatgcaccccaatattatttgttagagtggcgctcttatgctgacgttgataaaggcttaaagcatatcaaacgtggggcaagcctcatgagctataataacggtttggtcgtgtggtatgtcgatcaatcctatagtgataactgggtaggaaatcacccagggaacggtttccttggggtagtagatgctgatcagcaagtattgaagtggagtgacggctccattgctgccacaggcttccaagtacatgatgcagcattttctttgaatccaagtacgaagctcaatattgattatacagcgacaacgggcttaacgttggcagatcgctatattcgtccgactcgtacatttagtgataaaaagaattatgtgaatccaaataatccagatgcagggcgtgatgtaccaacatacggtctatcctttaaagtcgttggacaaagtaaggatcgttctgttggaaaggtattaatttctaaaagtaactaaacagaaagccggattctaccattgaatccggctttttgatatggtaataaaatgtttttgatgaaaagggcggctttttggtcgaatgtctgttcttttttattttgatatccgaatgaaatcattatataatagagactggaaggtttttctttcatacatggttcttttttagctgttaaaacaaaggaaaggatgagcgttaccaatgagttgtgtcactgctaagcaattgaaggtgattagagggacgatgcagactttttgcagccatttggagtatgatggtcacggtaagcttcatatcaataccatcatggcttttattaaaaaggaattcggtgtgagaaaaatgaaagacattccacaaagccggtttactgaagcgcttgaattaatacaagactttgatttatacacggataaaatagagattcgtgatcgtctatcagaaaggaattaactaaattgaatattttagcaatgatattagtaggaattgtcgcattagaacacattgtcattatgttattagaaatgttttttatggaatcaaagatggcaaagagatcctttaagctgccagaacacttgcaaaaggatccaaatgtaaaagtgatgtttgccaatcaggggctttataacgggtttttagctgcaggactcatttgggggctcattctcggatcgaatactgttggatatatgattcagctatttttcattctttgtgtgatcatcgctgcggtatttggcggtgtgacctctaataaatcaatcatcatcaagcaaggagtaccagcgcttcttgcattaattgcgcttatcctggcaatttaaccataaataaagccgccctagtgagggcggcttttatctttttcgaagacccatcagacgaataatggatgtcagacaaagagcaacggcaacagccaaaataatttttccatacatgacccctgttaggttcatcaaaaagacggccaatatgatacagagcgtgatgatgatcatcacaatcgaataggttttcatctcttttccactccttttaaagtcccctcacatccgagaggtctatccatcttacctcatatgatatcactcaatgacaattttacatgaaattccctaccaatagaatgtgacatattgattagatttgatgtcatgccatattttttagaaaatcgggtataccataaagagctgcattgaagtttaattgcttgatatttaattgtgcaaaatataaaataaccatatgatatatcgaaaggatgatcaagatgagtaagaaagtgttattagtatcgacaagcagttcggaaatgaacggacatccaacaggcttatggctagaagaattggcagagccatttcatatttttaaagaaaatgaactagatgtccaaattgtctctattcaaggaggcactgtccctattgataaaaattccattccagaaggtgttccagcgcaatatcaagatgtatatgaattacttgaagacacaaaggcgcttacagatgtgaacccagctgattatgatggcatcttctttgcgggaggacacggcccaatgatcgactttgcatctaatcaattggtagccgatgcaatcttagccatttcagacaaaaatggtgcagtcggagctgtttgtcacggtgtttcagcattcgttgatgtgaaggatcaagatggcaaatcatttatcgaaggcaaaaaaatcacaggcttcacaaacgaagaagaggaagctgttcagctgacatcaaaggttccatttttattggaaacaaaacttcgtgagcaaggggcagcgtttgaaaaaggagatgcctttgcaccattcgctgtagttgacgggcaaatcattactggacaaaacccaggttccagtgcagaaacagcacgcctgtttgttagaaccatttcataaaatgatcaaaaaccagtcgtaatatatgcggctggtttttttgtcataaagatgtcctaaaaaagaccaaaacaatgaatagaataatggtaaaatattaacagggcaaaaaacccaattaaggaaaaaggggatgttcctgtgagagcattttatgtgaaaatcactgcagctttattgtctattttactcgtcacaacaggtttattttcaccagcattaaaagcagaagaagcaccgaaatcagatgggaaattgtcaccactgacggaaaaagccattcagcaagtgcaagagtcgtttttgaagcaggatgaaggaaccgctatccaacagaagcaactgaaaaaatcttttaaagtagataagaaaaatggaatcagtatcaaacgaaaagctgctaaagatggcaagatgcgtacatctgccgttcgctccattgatggactagcaatcaaccaatcggttgtcttatcagaggacgacccagttgatttatggtttttaagcacatcttcacctcaggcactcatcagccggattacctcttcaaatcccgattatttcgttcaattatttgttgttgattatgaaacaggacaagcgtacccgacagacctgattcagccggcaggcagtctccttggtttaaccaatttaccagcaggtgactacgcattcggtatcacaagcggtggagatttcggagactcttacacgttacaggtgaatgcaaaaaacccgcccaatttcacaggggctgtatccctatcgtcaaccttacaatactttgtagctgagtatgcaaatggggatgtatttgccaatggcgcaaaagtatacaacaagcaatcgaagacagcagattatgaatgggagcgtgtattttatttctcttatgatggtaaatacgaacaaagaacccattcgatttcaagtgtaaaagtgaaaagcatttccgctccagtgtcgtactcagcgccttatgcaagctcctcagaggccattctcgtctacttagatgtggagacattgtttatgtaccatcaatcttcatatgcaagcggtcaatattaccacgatacctttgtagatacacttggcaagaaaacgccaaggtatttagatattgatgatatgacaaattacggcgatcatattttagctgttgatttgaaaacaggaaagccaattgatttcttcagtgtccttaatttttactatgccgcagggatcgagaagctgccaacgatcaaaacattgaattaagaaaggtggttgacatcaaatcaccacatgtgtagagtaaagataattaaatgacaaaagtccactaggggagtcatgtatgactgagacaagaagaaatcttggaccctttgaacctgatctagttcgtactagcggagggaagtggagctggaccttgtcttattcatgattgaatcgataagaaggccgctccatttggggtggctttttcatttattcaactgaagaagaggaggctttttttatgacgttttcagcgcaattaagaaaagaagcagaaccattatttgaagccatttatcagcatccgtttgtcagaggcctggcagcaggaaagctggaaaaggaacagatcattcattacgtcaaacaagatgcagaatacttacatgcatttattaaaatttatgcagcggctctaagcagatgtacagacaaagaagatattgcctttttccatcaacagattgcgtttgtactagatagtgagacgcaccctcatcaaaatctttgccgagtggcaggtgtatcgtatgatgagctccaaggagcttcattggctccgagtgctcatcactatattcatcacatgctgcaagtcgcccaggaaggcacgcttggggaaatcattgctgtcctgcttccatgtccttggacatattgggaaattggaaaacgaatgctctcagacgtgcagcctgacccgtcacatccgttttatgagtggatcacgttttatggagggttaaccgactctattacagtggagctttgcaagcggctcgatcagctggcggaaggagcaagtgagaaggaaaaggaaaaaatgaaacagcactttatcttaagctgtcagcttgagtacaagttttgggacatggcgtttacggtggaagagtggccagttccattggaggtgcattcatcatgacatggaagatgaaagaagtcgtccttgctgtcattttatccgttgcgtgcggtgtcatctatttagggtggtccacactttacttaccaattacagcacttgttggcccagcaggaggcaacatcatgtttggcatttgggtgattgccagtccaatcgtcgcgtatatcatccaaaagccgggagctgccctgattgcagaaacagccgctgccgctgtggaattactgacaggcagccactttggtctttcagccctgctgattggtgtatgccaagggcttggggcagaaatcgcctttgctctttttggttataaacgatatcgcatgtggacactgatgctgtcaggtgcctttgcagctgttggagcaatggcatatagcctcgttgcaaatggctttggttattacacgcctcaagttttactcatcacactgatgactcaaatcatcagcgggatgatactgggcggatgcttagcgaaagttgtggtcgacgcattatccaaaaccggtgtactgaatcaatatgccatcatgaaagaaaaacgaaacaaaggtgaacagcatggattcatttctcgcgtgcaataatctcactgtccgtttttatgaacagcctcagcctgttttgcatcaaatctctctttccattcaaaaaggagaaaaggtgcttattttaggaccaagcgggagcggtaaatccacactcatttcagttctggctgggattattccagaacatatggaagctgacatgcagggcgaagtgatattgcaaagacatacaggcgtcatgtttcaagatcctgattcccagttttgtatgcaccgcgtcaatgaagaaattgcctttagcttagagaaccgttccgtccctcgtgatgagatggatgacatcattcagcagctcatgcaaaaagtccaactcgatgtcgatccgaatacagacattcatacattatctggcggcatgaagcagcgattggcacttgcttgtttactagcgttagagccagatgtgctgttctttgatgaaccgaccgcacagcttgatccagcaggcagaatggagatatttcagcttctacagcagcttgcaggtgatcagcgacaaaccatgatttttgtagagcatgtgctagatggtgtcatcgaatggatggaccgggtgattttattagacgatcaaggcagcattttagcagacgggcctccaaaagatgtgttcgcgacatatgaagaagaaatgaaagaggcagggatttggcggccgaaattatttcccgagaaatggtccacaattattcaagacccatttcatccaatgagtcaaacgcttatgcaaacctttgaagcaagaaaagagcagcgtaaaaaagtgccgtcgactgagcgagagaccatcattcgcacagaagatcttcaattaagctatggaaaaaaaaggattatgagtgaccttcagctggatatcaaagcaggggattgggtggcgataattggggaaaatggaagtgggaaaagcacatgtctcaaacatttagtccgtttagagccaatgaaaaaaggcagcattttcttaaaagagacacccctcaaaaagtggtctgaccgacgactatatgaaaaaacaggctttgtgtttcaaaatccggagcttcaattcatacaagacacagtctacgatgaaatcgcatttggtggaagacaacgaaattggccagaatccgttgtgcaagaaaaaacagttcagctattggaagagttcggtttagagaagcatgcaaaagcgcatcctttcaccttaagcttaggtcaaaaaagaagattgagtgtggccacaatgctcctttttgatcaggatgtactattgttagacgaaccgactttcgggcaggatgaaagaacggcgaaggaattaatgaggcgtttgaaagagcgtcaatgccaaggcaccaccattttgatggtcacacatgatatggacctcgtcgataagtgtgccgatcaagtgcttctttttcaccaaggaaagcatgtgtatgatggcacgccttatgatttattttcaaatcaggaacttgtcgatgcttatcagctgagagcccctttgcattatcgctatgtggctgaaagaaaggacgtgctgacgattgcaaagtaatcactcctttctttccaatgtgaatccagtcatcaaattactcgctcatctgcttgcgatgtgttgtctcatggcgatatctgaccctaaaacaaccttcatcatctggctgtttgcacttggtattggacttgtcttaggcggatggaatatgaagtatcttttcacaagacttgtcccttatctgctcttttttattctcgtattttggatgatggcggcctttggcaagggggatcatactgtttggaagtgggcatggtttcatattacagaggagagtttgaaaaatggccttaccatttctttcagaatgcttggctttgtgacattcggtctcctttttacgtccacaacagatttgacggcctttatgatgagcttaatacatcaatgccgaatgtccccaaaatgggcatatgggatgcttgccggcttccggtttatcccgttatttcaaagtgaattaaagcaaatgaaggcagcacataaaatcagaggctataagcaaaaaaacagctggaaagcctttatgcgttatgcacttcctctttttacgcagggcgtacgaaaatcagagcgcttagcgattgcgatggaagcacgaggtttcacgggggcgagggagcggacgtattatcatgtcatcagcacttcgtggatcgactatatgtatcttttgctcatcggtatcagtgtcttgatgtgcatgtcctttttttaaaaatacccacattctattgatagaatgtgggctttttatatgtcttaggtcatttgattgatattagtgcacattacaggctgtaatagaccttataacgaaccgataaagaggatgtactgagaaaaagagaggatgaacgtgagcgaatgtcacagagaattgataacataatagacgctttaccaatcattggactagctatgagagagcaactaaccttttctgttttagggaaagagaaggttctttattatcagcaacatgggaacattgacttagggtttaaagctggggacatagtagctccagggttcgaaaacttttctatgttgaaaaatgggagagagccatcgtttatccaaattccgaaagaggtatacgggattccaatggatattgtagccgttccaattaaagatgagacgggtcaagtagtcgctgctttctgcgtggcctatgaccagaccaatcaacaacgattagatcacatcatgacggagagcaaccaagcttccgaaaaactagtcgcaatggttcagcaagttgccgcacattcagaggaactacaagcgacaagtgaacaaattctacaaaacacgaaaaccactgtagaaaattcctctaaaatcaatcaagtgtccaatcttataaaaggtatctctgatcaaacgaacttacttggactcaacgcatcaattgaagctgcaagagtaggtgaagcaggagcaggcttcggagtggtcgcaacggaagtgagaaagctgtcaactcacgccaaacaagcgacgacggatattgaaacagcgctaaaagatgtgcagggatcgattaaaggaatggaagaagaaatagcacaaattgtcgcttcctctgagcatcaagcagagcttgtaggcacgttcacaaaaattattgaaggtcttcatgaaacaaatgaaacgatgaaatcactggcagaagacttagtgaactatcaagtgaaataaaaaataccgaccaaaacctccagatgaatcggaggtttttttacgttttaaggtgggcaagttgttcggataatgaccgatttatcgctgacaggcagggtacacttctgtatgatagaaaaagagatactagtctggtcagtagacctattcataaggaggaagaccatcgtgacacaatcagcgaagctgcaagaaataatagcaccttaccgtacaatgttagatcaaactgaacaaccaatgattcaattacagatgaaacaaggaaaaacaggaccatacgacagcaaaattgcaggcgatccttacttcccaaaaaacgacgaatatccagttgatggtgaagggcaccctatgaagcttttggcacaaataaattttggacagctgccgaagctgaaggattatccagaaacagggcttctgcaaatttttatttctgtgcatgatgatctttatgggatgaatattgaccataaaacagagcaaaaaaattttcggatcaaatttattgaggaacctttcttggcagaagaagagttgttgactgatttttcttttgtgaaaattcctgatgatttttattttcctgtgacaaaggaaggcgtcattacaggtgaacgatcaagtgaaacgattagtgtagaagatttccgctttgagaaaatcacaggtaagcgcagctgggacctattcgaagatgtaaaaggcattgatggagatgaagcggatgccttgctagatgaatttcatgatgcagcgagtggctttggtcacaaattgggcggatatccaggctttacacaagaggacccgcgtacctatgaagaccaggaacataccgttctgttattacaaatcgattcagatgatgaagtagatctgttgtggggagattgcggaatcgccaacttttttatcaaaccagaagacctcaaacgaaaaaatttcgagaatgtcgtctataattgggattgctcctaattttgtaaaaaacactctttaagcactctttttagagtgtttttgtgtatgtttttagacttttttgcccctattttgtcatttttgagaggtaatatgtcattctttctagttgaccgtatcaaaaaaaaatgtaaaatcatcttaaagtcctcttttttgaagataataataaaatgacatatcaatctacaatgagatgctcgaaaaagtggaatgtactggggggtatcaattgatcatttcgaaagtaatcaataataatgtggtcagtgcgtatgatgacgagcagcatgagctggtcattatgggcagagggatcgcttttcaaaagaaaagtggagatccgattgacgaagaacgtattgaaaaagtattttccattcaaaataaagatatatcagaaaaattcaaaaccctgctttatgatattccaatcgagtatatgcaagtgtgtgaggcgattattgatcatgcgagaacaacccttaataaaaatttgaatgacagcatctatgtgacgctcacggatcatatcacctttgctattgaacgtcatcaaaaaggaatggacatcaaaaatgctttgctctgggaaatcaagcggttgtacaaagaagagttcatgtgtggtgtagaagcgatccggattattcaggacaagcttaacattcatcttcctgaggatgaagccggttttattgccatgcatattgtcaatgcagagctcaatgaagaaatgccaaacgtgattcaaattaccaaactcattcaagatattttaaatatcgtcaagtatcactttcaaattgatttagacgaggaatcattaaattatttccgttttgtcacgcatttgaagttttttggacagcgtctgtttaacgaaacacaaatggaaaatcaaaatgaattcctgtatgaagtagtaaaagaaaaaaacaccgcagcttttcaatgcgctgaaaaaattaacgattatgttcaaaaagaatacaaccgaagtctcatagaagatgagatgctatatttaactttgcatatcgacagagtggtaaaaagaaaataaattcaaaaagaaagcgttgacatcataaaattaacatgataatttataactataaacgaaataacccacaatcttttaggattgttactggtcaagcaggcaaaacctaaatcattgtccctatctttgataaggcgtgatttaggtttttttatatctaaagacttataaaaattaaataacgatcaatcgctatgaaggattgttactggttaagcaggcaaaacctaaatatcgattaatgtctgaattgctatttctcggacattaatggatgtttaggttttttctatatcatgatttaatcaacgattggagggtaatacaatgaaccacaaacaaacagcaaaagaagttctagagcttgtcggcggtgaaaagaacgtcaagcacgtcacgcattgtatgacaagacttcgcttcaacttatacgatgaaggcaaagcggataaagagaagctgcaatcaacagacggcgtcatgggtgtgaatcaaagcggaggccaatatcatgtcattatcggcaatgatgtttcaaatgtctatcaagcgatgattgctgactcaggactgtcaacagatgtaaagtcaggcggtacagaagaagcatcaaaacaaaatgtgatatcaaaacttttcgattttatctctggtgtcttcacgccgattcttccagccatcgctggagccggtatgatcaaaggaatattggcactcatgcttacgttccagtggatatcagataaaagcagtacgtatgcaattttaacagccatcggagacggagccttttacttcttaccgattctactagctgtaagcgtagccaaaaaacttggcacaaatcagtatattgccgctgccattgcagcagccgcactgcacccgcagttaactgctttactgggcgcgggaaatacagaatttctaggcttgccagtggtttctgttgtgtactcttcatcggtgattccaattctactcaccatctggctcggttcatatgttgaaagatttgcagaaaaatatagtccgaaatcattaaagatcatccttgttccaacggtcacacttcttgtcgttgtaccaattatgctcatcgctgttggaccgcttggtgggattatcggaaatggtctttcaggtggaattgatttattgtttaaacatgcaggtattttggccggactcttgatcggcggcttcatgtcaccattgatcattacgggtatgcactatgcactacttccaatcatgatcaacaacattacgttaaacggttttgactacattctcccaatgatgtttgtagcgaatatggcccaagcaggcgcagcattcggtgtcttcttgagatcaaaaaacaaaactttcaaatcattggcgatgtctacaagtatcacagcattaatgggtattactgaacctgctatgtatggtgtgaacatgcgattgaaaaaaccgttctttgcagccctcattggtgcagcagcaggcggcgtgttcatgtcgatctttaaagtaaaatcatatgtggtgtcgggatcagcaggtattccaggtatcccaacattcgttggcccaacatttgtctactcaatcatcggtttagtgattggctttgtcgtagcaaccatcatgacacttgttctagggttcaaagatgtaccagtgaaagatgatacaaaggcagacaaaccagaagagaagaaagatacagcaacgcttcaaaatgaagtggtacaaagcccgcttgaaggtcaactaaagccgctaaatcaagtcaatgatgcaacattctctaatgaaatcatgggtaaaggtgcagccattgtcccaacagttggacgtgttgtagcaccgttcaacggtaaggttgaaaccatttttcaaacgaaacatgccattggcttaaagagtgaccaaggcacagagcttctcatccatgttggaattgatacggtgaagctcggcggaaaacatttcacaagtcatgtagagtcaggtgatcttgttcaagcaggagatgtgctcgttgaatttgatatcgagggcattcagcaagaaggctatgatgtcaccacaccaattattgtgaccaacacaaacgattttgcacaagttgatgcgaaaacagaaggcacgatttcagtacaagagacactgctcacagtcagtgtagaagaaaatgaggagggcattcaacatgaacaagttagaaaaaacatttcctaaaggttttttatggggcggcgctgttgcgggcaaccaaattgaaggtgcttataataaagatggaaaaggcttatcgacagctgatgtatcaccacacgggattatgcatccattcgatgaatcaatgaaagacttgaacttatatcatgatgcgattgacttctaccatcgctataaagaagatattgcactctttgcagaaatgggattcaaatgcttcagactatccatttcttggccgcgtattttcccaaatggcgacgatgctgaaccaaatgaagcaggccttgctttttatgacagagtatttgatgaactgcataaacatggaattgaaccagttgtcacgatttctcattatgaaatgccgcttgcacttgtgaaaaactacggcggttggagaaaccgtaagcttgtcgatctttatgaaacatacgcgaaaacgttgtttactcgctataaagacaaagtgaaatattggatgacctttaatgaaatcaacgtcgtgttacatgcgcctttcactggcggcggacttgtatttgaagagggtgatgacgagaaaagcattcaatatcaagcagcgcatcaccaatttgttgcaagtgctttagctgtcaaagcaggacacgaaatcattcctgatgcgaaaatcggctgtatgattgcagcgatgacgacttatccgtacagctcaagaccagaagatatgtttgctgcaatggatcaggatcgtaaaacattgttcttctcagatgtacaggcaagaggctactaccctggttacatgaaacgatacttccgcgaaaatggaattcatattgagttccaagatggtgatgaagacatcctaagaaaccatacagtggactatattggcttcagctattatatgagttttgtgacaagtacagatccagaggttcttggacaagttactggtggtaacctatttgaaggcgtgaaaaacccttatctagaagcaagtgattggggctggcaaattgatccaaaaggacttcgtacaacactaaaccagctgtatgaccgctaccaaaaaccattgtttattgtagaaaatggattgggagctgtcgatcaagtagaagaagacggatccattcaagacgattaccgaattgattacctcagaagtcatttgctagaggcgagagaagccattgcagatggagtagacttgatgggttatacaagctggggcccaattgaccttgtcagcgcatcaacagctgaaatgaaaaagcgctacggcttcatatatgttgaccgtgataacgaaggaaaaggtacattagatagaaagaaaaagaaaagcttcgattggtataaacaagtgattgcgacaaatggtgatcatttagatgcataaaagaaaaagacaaaccgttcatactgcggtttgtctttttttcgtcaaggggactatgaagtccacacttgatctgcaatctcaatcacatgacgcagcttttcccattgctgctcttctgttaacagattgccttcctccgttgaggcgaacccgcattgcggactcaagcaaatctggttaatgtcgacatattgagccgcttcctcgatccgttttttaatctgttcagccggctcaagctcaccatattttgaagtgacaagccctagtacgatttggaggtttgggttcttcacatagcgtaggggttcaaaaccgccagaacgatcgtcgtcgaattctaaaaagagaccatccagatctaagccggcgaaaattgtttctgccgctgcttcataaccgccttcagctgcccacgtcgatttaaagttaccacgacaaatgtgcatagtgatcaccaaatcctctggacgatcggcaaccgcttcattgattgttttcgcaaatgactcacgcagttcatcttcttctcggccaaaggcttcgatttgttcatgacctttttcagaaaagaacaccgcccatgcagtatcatccaactgtaagtagcggcagcctgcatcataaaaagcacggatggctttcttatacgcctgtgccacatcatggtggaatgcctctaggctgtcgtatactccttcttcaagttttccacggaaaaagagcatattcggacttggaatcgtcattttagccgtatgatcaccagcgatgctttgaaggaaacggtaatcctctagcattggatgatctgtaaagtcaatcttgtccgttaccttgatgccacgcgcttttgttgtcgtattgtggaattgaataccttgatccgcttcaaatccttcgaccccatctaatccctcaagaaagtcaaaatgccaccatgcacgtctgaattctccatctgtgacaacctctaatccaatttctttttgtttctccacaatgcgtgtaatttcttcattttcaatttgtcggagctgctctgctgtcagcgtaccgtctgccttttgcttgcgtgcttccttgatacgttctgaacgaagtaagctgcctacttgatctgcgcgaaatggcggtttcgttgttttctttccaatggtttgtacttgtgtcatgctgaatcccttctttctacaggttaaaaatcaaataaaaaagctcttccttggataaggaagagcatcatatactgagagaactctgccttatcttcaaacaagcatctgcttgtttaaggaattagcaccattctgttccgaggaacagcggttgccgggtttcacagggccagtccctccaccactcttaataaggttaccttttgattcaattttcttaataaacataattattcaactttttcgagagaaagtcaatggtttttactgtttaattttctacataaacaaataatggtaaacaaacccgatgtggaaaaaggaagaataatatggaaatagcgcttcttttggttcttttgtcatggtatactcaattggtaatagacaaaaatgggggtttttactatgacaataaaaaaaggtctaatgatcagcctgctcattttttcgctgattgtttcgttgtttgcgccagttggatctgcggatgccaaacaagcaaaaaaagcaaaagtaagtacgcactattataaaaagaaaaaaacattcaaatatgcacaggtgaaaaacctaagcaaggcgcatatgaaaaccatcaatcgtgatttaaaagaagatatcgcattctcttattctacgtacttgttcttaaaggacgaagcgaaaaaggaaggctttgggaagatcacgtacgaaagatcgtttaaaacgaaatttaacaatgggaagaagctcagtatcttaaactatgactacatgaatgatggtggaatgcatggggatacgatggtttccagcatgaactatgtgttaacaaagaaaaagacaaagcagctgttcttgacagacgttgtgaaaacaaagaaaaaacgtacgaaagtaagagattatatttataactacacaaagaaacataaaagcaaattctatgcgaacctgaaaaaaagtgacattgaaatcaactacaacacgcagtattacttcacgaaaaagggaattgctgttgtcttccagccatatgaaatttcaccttattatgtaggaattcctatgattcaagttcctgcgaaggtatataaataaaaagaaaaaaggccaatgaatctggtcgttttttgttatttactcaaacaaaaagagcccctcatgaggctctctctttagatttatacttgtttaggtgcatcatttagtggatgacggcgttttccgttgtagtggcggcgcatacgaaagatttcaaactccgaaagctctgcgctttttcgttttggtgtgcggttatcttttttgaaagagaatagtaagtagcagcaaagtgaagcgataatcaataaaatcatcatatgacattcctccaattcatcctattctttagtgtagacagggtgagtgatgtttataactgaaaataagcagcagaatcggtttagttcttaaggtttagtcgatctgctaatttaggtctaaaatactggttgtttttaactattatatttccagttattgcactcgtcaagaagaatttttctggtgttgtctctattagtacgaaaaagtgtcataaaagtttcagaaaattgtaaacttttattaaaaaaccgttcccgaacaggaacggttgtaaacatatctatgctttttcttcaaataaacgtgcgatttcaacgatgacttctgttgctttcaccatgttctcgacagaaataaattcatatttaccgtggaagttttccccgccagtaaagatgtttggcgttggaagacctttatatgaaagctgggagccatctgtaccgccgcggatcggttcgatcacaggtgtcactgagcggttttccattgcttcatgggcaatatccacaatatgtttcaccggctcaattttttctctcatattataatattgatcttgaatgctgaggtttatgctgttttctccgtagatggcttttaagtcatttgctattttttcaaacagtgctttgcgatcgttaaatttgtctttattaaaatcacgaataatatattgcagctctgcttcttcgacttctcctacaaacttcgtgagatggaaaaatccttcgtagccttctgtgtattccggagattcatcagaagggagcttgttgtggaagagcatcccaatcttcgcagcgctgaccattttgtcttttgctgtccctgggtggacgttgtttcctttaattgatactttcgcacctgctgcgttgaagctttcatattgcagctccccgagcggtcctccgtcaattgtataagcataggaagcgccaaaggcatcaacatcaaatttgtgcggccctctgccaatttcttcatctggtgtaaaggcgacgcgaatttttccatgcttgatttctggatgctcaatcaagtaatgcatagcggtcataatttctgcgatacctgctttgttatctgcaccaagcagggtcgtgccatctgttgtgatcagcgtatgtccttgatatttttgtaaatttggaaactgtgctggagataaaacgatatgtagattttcatttaaggtgatgtcgccgccttgatagttttcatgaagctgcggtttcacattcttgccggtgaagtcagtggctgtgtcgatatgagccaggaagccaatggtcggcacgtctttgtcagtgttagacgggatcgttcccatgacatagccgttttcatccattgtcacttcttgaatcccgatggacttcatctcttcaactagctgtctcgctaggttcaactgtccttcagtagatgggcagctttccttttctgcatctgactgcgtatctaccttcacataatttgtgaaacgctgaatcatttcctttttcatctatacgtcactccttttgtagaatacgtccattttatcacgtcttgaatgcgcttcataacaagaaaggttttctctggcaattagagagtaaaaagacctactttcattaggtggtgtgttgaatggttctttagggtgatttttttgggtgtctttttatttataatgaggacatataaaatcatccatttgtacgttaaattgggagaaaggggtgcgaaagttggattctagtcaaacgctggcactcgctcaaaagtttcaggaagcagctgatgagattcggcagtcaaagcagctgctggagaatcggctgaaggcagtaggatcaggctggcagggagaagcaaggaataaatttgatcaaagctttgaggaaacaacgtcacgctatgatcaatttgaaaaggacttgcttgaaacaagtcaggaactgcgcgacgcagcggtcaaaatcgaggaacggaaagctgaaattgccagaatggaagagcttgagcgaaagagaagagaagaacggagagaaagaaatcgagaagggagatgatgtgatggcacgtgacattgtggttgatccagatcagctgacaggactggcgaatgatgttgtaggcgaattgtctgtcattgaaacgaagcaccgcgatttacatagtgaactggatggtctcattttaggctgtgatcctcggtatagaagctgtttttcaggtgtcggggatgcatggggagcaggacaagcattgatcagtaaattgagcagtgatgatatcgcgattcgtcatgcaaaagataaaatggtcgaagcagacgatattttacggaaaatgtacagcatctatgatcaatatggtacactcacgagcttagctggtattgtgatgatgcaggcgaaatactacgggcttgggatgacgaccttcattaaagacaatggccggtatgcagcgcagcattcaaagctgctgcttgatctgaccagccgggtagaaggaacgagatttgaccggttagcaaggatttggctgagtaaaaaagaattattaaagcgatcaaactggtcgatggctgatttggtccataagaaattcacaaaattttatcctgacgatacagttgcattcacgaatagtgtccgtgactttacaaaaggaagtatcaattggaaggacacggctgcgatcaagtctgttttgaaaaatggatcaagattcgccaaaggaaatgccatcattgcaacggttgtcactggtgcaacggaaacggtcggctgtggattgaaaattgccgagaactatgcagaattcggtgatcagccagaagtccttaagcgtgaaaatgcgaaggctgttggaaatgcagtgaacaatacggtctttatcgctggcggatctgtcgcaggtgccgttgtcggaggagctctaggaagttttgcaggaccgattggaaccgttgtcggaggagccattggttcagcagtcggtggatttataggagaaaaagtcgccaagctgacatcaggctttgctgagcaggttgcagtgaaattaaaggacccaattcatgcggtcgtggataaagggaaacaagcattcgagctggcgggtcaaggtgtgaaagcagtcaatgacaccattgatcaggcaaatcaggtgatacataaagggatagaaaaaacaaaagaaaccgcagattcgctcattaaaggtgcaggcgatttctttaagggtgcattttcttttggataaggagagatcaagttggatcagctaagtctaagtattgaggaactcatctttagtttttacagtgaaggctattttgaacagggcatgtccttaaaggaagcgtattatcctgatgtagaggacgagcgcctagggtttttatttgaaattgcgtgccgctctttgctcgcaaaaggtgtacttgaatttcaaaacagacaatatcgttataaagcggaataccgtcatttcattcaggcgatgaatgatgcatctcacaccgtcaaggcgtctcgatttggggataaagatgaagaagtcagtacctcctttcacacgacacaaatgggcgtatatgcgcaccatacgctgtatgatcaacaagtccatcagattcaaaaactgaaagacgaccagctggcagaggagcaagtgactgactttttcaacatacagatgagtgaacaccctgcacctgtcgtcaccctacaagcagaggaatttgaaaagctattagagcaagcaagtgaggcgaagaatgagtggccctccttccttcatcgagcagagaacgaagaactcgtgcaggcatttgtttctgatgtaaaggcgagaaaaggaaagatggactccctgatgaaggtcgtctacgacaaaaacaatacgcctgatgtggagtccatgttatttgtcattccaggtgaggaacagtcgtggcttgtgtcgggaataaaagaaaatgaatttcgcattgagacggctcatagagacggattacgttctatattctaatggagaaaaggagaatgacgcttgaatccaagtgaagtaatagaagtgaggagcaggacctttttaagggtatgggcattcttagcaacaggcggcttcggtatcatcggtatttggttgttttcagaagctcttacatttgaatcgaattatacattgtttttatttttaggcggactactaggcatagtttatggctggatctctttcttgatgattttaccggcttttacgaagagaggaaatgtgatttttcgcattcagcgcgggaagaatggcgcggttttacatcgcgggcaagcgatcccttttcaagacattcaatccatcgatatgcgcaggcatcggtacagtgtacggggttttctcttcatggatgtgttgattcggaaaatagacgggaaattgatcaagattccagcgtacagtattttagatgaagaagtattcgagcaagccgtcaaacaagagatctacccatatttaaatcagtcagcccaagagaactggagacagcagcatggtcaggtcgaagagcagatcgactaggatgtattttccatgattccgaaggatgaggtgccactttttcgaagaaatcgtgtatgatgtcagtaaagactgaacactcggagaggtgatgagagatggataaagagatggtaatcgacctcgtcacagaacaaatggcacggattcgaaaagaaaagaattatacgcaggaccgcatggctgaggtacttggtctatcgaaacggcatttgcagcaggttgaaaaaaataggctgcgcctcaactggacgcaaactgcggccgtatgtgcattattcagggatagtgacattttaaaagggacacttggggatgatccgcttgagattctggaagtcgtggcacatgatgaattgcatctatcggtggaacgtacgattggcggaaaggtttggtggcggacgtctatcaaaaaaggcacatttcgtcttcagcaaaatgtgcttagtcagcattaccgcatcttagatgatgagaattatcgctattatagttcgtttaataaagatgaagcgaagcggcggttagaggaattaagtcagctgtcttctccttattcataagcagctgataggaaaaaggaaagagaggcacccgattgatagggacctctcttttctgtgtttatacttttagagtgtttttcgcccgaataaaggcaacaagctgtttgatttcttcatcatttaggggaacgccgtcgacaaggatggttccttcttttgcttccgtcagttcaattttgatatcagagattttgcgttgtatctctggctcgtccgttctaccaagtaaaaaatcaatggacgtatcatacaaatcagccagccgcttcactgcttcaagcgaaggtcgtcggtacccagattcgtaaccggcataggtgcttttggcgatacctaggcgatctgccgtatgctggagagaccattttttcttttttctaagggtggttaaacgatcgagtatcattacatgaacgctcctttatatacaacaacagtatatcatattttgacatggaatgtacgcgttatgcgtaataatttcttgattaattcgcgttatgtgactataatggcaatgaaggtacgcgtaaagcgtatattatagaatagcacaagctagcttataatatgtgtgacaaacgaagtaattttattgaaagaggtggacctgttgaagaaattattgcttttaaccactggtgggacgattgcatctgtagagagtgaaaacggtttggctccaggtgttaaagctgaggaccttttaagctatttaaacgaaattaatgcagagtatacaatggacacaaagtccctaatgagtatagatagtacaaatatgcagcctgaatactgggtggatattgcaacagccatttatgaaaattatgatcaatatgacggttttgttgtcacgcatggtacagacacgatggcctatacatcagcagctctttcttatatgctgcaaaatccggataagccaattgtcattacaggctcacaaatcccgattacgtttaagaaaacagatgcgaagaaaaacatcaccgatgcgattcgctttgcatgtgacggcgtaggcggcgtgtatgttgtctttgatggcagagtcattcaaggaacacgcgcaatcaaactaagaacgaaaagctatgatgcatttgaaagtattaactacccatatattgcatcgattgaaaaccatcaaattgaatacaatagcaaagtaaaaagatcgtcaatgaaaccgcttaaattagacgcatctttaaacaccgacgtttgtctcttgaaattgcacccaggtctaaagcctgagttcttagatgcaatcaaaggcgtctacaaaggagtcgtgatcgaaagctacggcagcggcggtattcctttcgaaggaagaaaccttttagagaaaatcaacgaattgctcgaagaaggcatttctgttgtcatcacaactcagtgtcttgaagaaggagaagacatgagcgtgtatgaagtaggacgcaaaatcaatcaagaactggtggcacgttcacgaaacatgaacacagaggctatcgtgccgaaactcatgtgggcactaggtaaaacaacagacccaagagaagtgaaaaagattatggaaacgccaatcgcagaagatttagtgatttaactattctatagaaagcaggtcatatcagatggttcaagcaacttatcgctatgagaaggattttcttggtgaaaaagaaattccggcagacgtgtattatggggttcaaacccttcgtgcaaaagaaaatttcccgattacaggatatcgcatgcacgaggaactgatcagagcctttgccatcgtgaaaaaagcagcagctcaagccaatatggaagttggacgtttatatgaaggaattggaaatgccatcgtacaagcctctgatgaagttattgaaggcaagctgcatgagtactttattgtagacccaatccaaggcggcgcaggaacgtcgatgaatatgaatgccaatgaagtgattggaaacagagcgctagaaatcatgggacatcaaaagggtgaatacatccatttaagcccaaacacacatgtaaacatgtcacaatcgacgaatgactcgtttccaacagcgatccacatcgctgtattgaagcagttagacattctgcttgaaacaatgcaaacgatgcaggacgtattcaaaaagaaagcaaaagaatttgatcatgtgatcaaaatgggacgtacacacctgcaggatgctgttccaattcgtttaggacaggaatttgaggcatacagccgcgtgctcagccgtgacattaaacggatcaaccaatcaaagcagcatttatatgaagtgaatatgggtgcaacagctgttgggacaggcctaaacgcagatcctcgttatattgaaatcgtggtgaagaagctagcagatatttctggtcttccgcttgtaggcgcagagcatctcgttgatgctacgcaaaatacagatgcttacacagaagtgtccgccgcattaaaagtatgcatgatgaacatgtctaagattgccaacgaccttcgcctaatggcatctggtccacgtgcaggacttgctgaaattgcattgcccgctcgtcagcctggatcatccattatgcctgggaaagtcaatccagttatggcagagctcattaaccaaattgcattccaggtcattgggaacgaccataccatctgtcttgcttctgaagcaggccagcttgagttaaatgtgatggagcctgttttggtctttaacttgcttcaatctattagtataatgaataacggattccgctcattcacagatcattgtttagtggacattgaagcaaatgaaaaacgtttgaaagaatatgtagaaaaaagtgcaggcgtcattactgcggtaaaccctcacttaggctatgaagccgcggctagaatcgcaagggaagctattttaagtggagaatccattagagatctttgcttgcaaaatgatgtgttaacagaagaagaacttgatattattttgaatccatacgagatgacaaagcctggtattgcaggacaagaactgctagaacgggaataatatcaaaaattttattttattaatatgtcgaattgcctgtgaaatagagaaaaacaggcaattcactttctttcgaattgacacacttttttcacaatattttgaaaacgcttaacgcactcacaaagggaggaaacacaatgaaatcaccacgtctgccgtctatgttagaagtcgtgtctgtacttggcttatttttagcaattgttttatcttttactctttatttcaaattagatatccaactagcattgtttatctcatggtttatagttatcgcattaggtattcgattggggcattcatataaggatcttcaaaatgcgatcacaaaagggatatcgaatggtctagaagccattttaattttaattgcagtaggtgcacttgttggtacatggattgcaggtggagttgtacctacgttaatttactacggtctagagtttattcatcctaatatcttcttattagctacacttgtcatctgtgcactcatgtccattgcaacaggaacctcttgggggacggttggaacggcagggattgcgatgatcgcaattggtgaagggctaggtatcccacttccgatcgtggcaggtgccgtcttatctggtgcttattttggagataaattatccccattatcagatagtacagtgctcgcttcctctctttcaaaagtggacgtgctggcgcatgttcgagcgatgatggttttatccgtaccagcctttgtcattacggccattatgtttacggttacaggctttatgtatggcggacgcaacattgatcaagataaggtagaatttttgaaaaatgcccttcatgatacattcaccatcaacatttggatggtcatcccagcagtagtggttgtattactgctcgtatttaagaaaccttcaatgcctgttattgccattggtgctcttttaggatctatttgggcgatggctttccaaggaatgaatccagcagatgcgattggttcagcatacaatggcttctctattaattcagatgtagatttcttaaatacgctgttaaatcgtggcggtattgtgaatatgcttggatctttagttgtcattattctcgggcttggttttggtggcgtacttgaatatctcggcgtcttaaaagtgattgtcgctactttcgagaagaaattatataatgcaggaaatgtaaccttatctacacttgttgttgcattcttcgcaaatatttttggctgtgcaatgtacgtttcattaattcttacaccgaaaattatggaaaaaagctacgataaattgaaaatagacagacgcgttctatctagaaacgctgaggtcggtggaacaatgacgtctggtatggttccgtggtcagataacggaatttacatggctggaattctaggcgtctcgacattctcatatttaccatttatgtggttgagctttgttgccattgctcttgccattatctacggatatacagggaaattcatttggtacgtcaaaaatcaacaagactcagaagaatcggcttcataagccgtttacaaaagccgcctcaattaggcggcttttgcttgtcctaggaccgagagactacatatgatataaagaagatgatcgggagtttagaccctttataaaagaggtctaaaggggtaatgtgaagcagaacgaaagcatatttatcccataaaaagggtacaaatccctattcaaacatgagtctttgaaccttataataacaatattggaaaaagtgctattcaccttacgctcgtttagaggaactctaagcagcgtttttattttttgacaggaggaggaacccataatgagcttgtcggatatgctgtctgccctaaacggtggcattacaagtaaaaaagcagaaattgaagagaaaatcgctcgacttaaaaaggcgaaaagtaaggtcgaacgagaacaagatgcggcagaaacagacctgaagcaaatcaagcagccaaagcttggggcctcttggaaaggtgagcgaagcaaggatttcaaatcagagcggaatgaagcacatgatgcgctgcaaacgattgtgaacgacaaatacccacgctacgtgagccgcatcgaattcaaaatcagtacattagaagctgaacaaactgcgttatcctttgccagttccttagctggagacgccgcacgtcttgctgaaaaaggagaagacgcagtagaggacgccaaacgcttgatctcaaaagcatggaacagtttttaaagctactttcatgctgaacaaatctggaggatatcacgatgggacaaattaagttaaactaccaaacagttatgaatcaactagatgaagtctcccaagcagtcgaagctttaatgatgaaaaaagcagcagataaagcgggtgaaaacagccttgaatttgtgaccaaatggacggcacgtgaggcagaggtgaacgaaatggtctcaaactttaaagaagccttaatcaaaaatgtccaggacacgcgctcgaatgtgaaaaccttaaaagaacaggacgaagcgattgctgcaaaataatcagcacaatcgcttttatttatggattacatttgcatgataagaaatatagttcaatggaatcatataaaattcaggatgtacgaccttgtattattccgtttttcttccaaacacgtcactaaaaggacaccttttccctatttaagactgaggcttttcaccttatactatacttaatgaaagcgaaacgatagaaatgtcaggattggaaaaatcaagtgagtcgatagcttccaaggctctgacgctgtgctttcgtatgaggtccgatagaggtggatgacatgagtttatccgagatgctacaccatctgcatatgggaattgaaaacagacgtgcagaatttgatgaaatgatctctcggttaaagacagccaaaagcaatattcgaacagaacaagatcttgcgcagtcagacataaaggaaattaagaagcctgctctagattcgtcatggaaaggtgagagaggaaccgactttcatcgccaccgaaaagacgcctaccatgtaatgcacgacatcgtgaacaatgagtatgaaaaatatataaccgagattgatcaaaaaatcttgcactttgaattaaaaaaaatggagctggctgttgccagtaattttgccggaagagcccaggacgtgatggaaaagggcgaggattttgcaaaggatgttaaacatttgattgaacggggctggaaagctctttaaaataaaatataaaacagccgtctcataagcgagcggctgtttttttgtttagtcacatccaccaccgctatcgcctgaatctcccccgcaggaggcatcagaagcgtgatgagtatatgaatcagtataggtacttgtcgttgaactgtgatgtgaagaacgcttagcagatgtacgtttatcctttgatgtgaacaggtgggcaatgattgctcctaaagaagccaatatgatcataacaacaaacataaaagaacccataatgcatccctcctcttgtttcatcatcatacgattgagccatattgaggttcccgatttgtaagaaaaactgggcaaagagttctattttcgtttatgatgataggcaaaagtaaatgccaagggaggagagcccatgctatctttacgtcaggaggagctcctgaaacgcttgatgcaagcggagcaggaactgacaagtgaagaaattgcccgcgtgattggcgtcacatcacgaaccatccgaacagatatgaaagcgcttaaatatataatagatgaacaaggagccgcactacatatcaaacgcggggcagggtatacattgaccgtcgaggattatggggcatttcgtacatttttgaaaaagtcgctgagagaaagaaacgaaaaaaaggaacaggtcattcccaatcagcctaaagaccgtgtggcgtatctattgaaaaggctgcttctgtctgaagactatatcaaattagatgggttggcagaggaactatttgtgagtgaatcgacagtgaagaatgatttgaaagcggtcagacatttgttttcattacatggactttctgtagcacatcgccctaaatatggattgcggctgacaggggatgaaatgaaattaagatattgtatggctgagcatgtgtttcagcaagagcatgcgaactctgcgctgttacctgaagaaacgtatcaattggttcaggacattgtgcgttcacgtacaaaagcaagcggacttcatctgtcagagatcggtttaagtaatttagtcacccacatcgccattgcatgcaaacgaattgaagagaaaaaactagtcatgatgccagaagcggaattgaaagacattcaagtgcagcctgtttttcaagtggctcaacaaatggcagaagatattcggcatgtattagctattgattttccgttatctgaaatggcgtacattgcgattcacttgatgggtgccaagatgatggcatatggagatgacggccatacgctatttcaccttctagacgaagatcactttcgcttcactcaccaattacttgcttatgtagaggagcacatgtcacttgatattcaatttgataaggagttgatcgttggattaagtcttcatttgcgttccgccattcatcgttttaagtacgatatgaacattcgtaacccctatttaccggacattaaaaggcattatcccattgcatttgaagcgggtgtctatatggggagatggctgaaggaaaaagagggggtcgagatccatgaggatgagattgggtatttggcgctccatatcggtgctgcaatcgagcggacaaaatcacagcatgtgagaaagagatgccttattgtgtgtgcaacgggtgtcgccagcagtcagctccttcttcataagctgacggcggcttttagcggaaggctggagatcgctggaactgcaagtgttggggatcttccttcgtatgatttgagaagcattgattttattattagtaccattccgcttcagaacacattgccggtgccagtgattgatgtacatacgattttaagtgacgatgatattgtacggctgaaacgttttgtgcaggatccacaggatacaggggttttgcggtatgtcagtccggcgctggcattttatcagcaagaccttcaatcaagagaagaggttcttcaattttttatgaacgtgctaaaggaacaacatcgcatcccggacgagtttgaacaattattgttggaaagagagcaagtgtccccaacatcgttcggtcatttggtcgcgattcctcatccgatgaagccggcaacagatgacacgttttgtgcgatctgcacgttgaaaaaaccggtgctgtggggtgaagatcgagtacaagtcgtttgtttgttgagtatccagaagacgtatcaaaaagaattacagtcgctttatcaatttcttgtgcggctgacagagcggaaggaagtggtggaacaactcatcaaggccgcttcatttgaggaactgacggcggcgcttcaagtattggagcatccgaatgaaaaaacgggacaaccatttccgcatctgtgaggaaaaagtttagatgttaatgaaagcgcttttaaaataacatcaaaaaggaggatgatcacgagtttttgcaaagggggagacggatcatgagcttcaaggagaaagcggcagacgtcatggggaatgtggcttatcgcatcacgaatcagaagtatattatggcgattaaacaggcatttgtcacattgatgccaatcatcattacaggggcttttgctgtattggtggcaaatatgatcatgagcccggaaacagggcttgctcattttgagatattcagatttttagcggagcttcagccaattatgaaggcaatcaattatgccacgctaaactttttaacgattggggctgtgttcctcatcgggatagagcttgggaaaatcaacgggcacaagtccctgttcccagggctgatggcattgatttcatttatatctgttattccaacgacacttcttcttgaagttgatggatcgatgcgtgaggttgtagatgtactggcaaggcaattttctgatccaaaaagcttatttttagggatgatcattgcgatcatatctgtggaaatcttttgtaagctgaccgaggtgaaatggcttcaaatcaagatgccagattctgttccatcgaatgttgcgacatctttttcgtcactttttccttcgatcattacgattacgatcattagttcattcggctttgcatttcaccgtttgacaggcatttatttgcatgaagcagtgtataacgtggtgcagcgcccgctagaaagtgttgtacagggtctgccggggattttaacgttgatgtttgtggcgcaatttttctgggtgatcggcatccatggcaaccagatgatcaaaccgatccgggagccgctcttattagggtcgattgcagtgaatatgacagcatttcaagagggaaaagagattccgaatatcatcacgatgccattttgggatgtgtatatgagtattggtggttcaggtgtgaccattgggcttttgattgcgatttttattgctggaagaagggaagagatgcgaagcattgccaagctctcatctgggccgggcctcttcaacatcaatgaacccgttatttttggattacccgttatgttaaaccctgtgatggcaatcccatttatcgtcacaccgcttgtgacagggacgattggttacattgcgacagctacaggatttgctggaaaagcagtcgtgatggtgccgtggacgacaccgccgattgtgaatgcatggctgtcaaccgctggcagcatgggagctgtcattacacagctcatctgtattgtagtagcagtcttcatctatttgccatttgttctcttgtctaaccgcaaaccagaagcggcaccagattcagaataaaaggaggggcatgaatgaacatgcaatgtaagtggtatggagaggatgatcccgtttcacttgcgcgtaaatatgcgaaaaatggcgcatccactttgctcattgacgaaatgccatcgttcatgaaaatggtgattttgaagagtcagcgcacctttcgtcagcaggaagtcttgatatgggggcaattgtgaaggctttgtttgaagagggctctaatggctatgtccggtcggatcatggacgtatgatctttggcgagacaggcagacctggctacggtttatatgatcgagcacttggggctgtgtatttgcaaggaatttgggaggggcttcacgttcaaacgaggaaagggaaggtagcgatatgaacagaatcgagattccaagtgattttatcctaggtgcagcggcttctgcttggcaaacagagggatggaagggaaagcaggtgcatcaggattcgtacattgattcatggtataaggaaggttatcacgtgtggcacgaaggatatggtccggctggtgcgacgaacttttacgagcgctatcctgaagatgtggccttaatgagagagattggactgacacattataggacatcgatcaattggtcgaggtttctcatagattacgagaaggggattgtggatgagacctatgcccgttacattgatgacttgatcaatggattaattgcagcaggtgtagagccaatgttttgcttagagcattatgagcttcctgccgttttgcttgagaagtatggcggatggtcatcaaagcatgtcgtcgagctgtttgttctctatgcggaaaaagtgtttgagcgctacggggacagggtcaaacattggtttagctttaatgaaccaattgttgtccaaacacgtgtttatctagatgccatccgttatccctttgagcaaaatacgaaaaaatggatgcagtggaactatcataaagcgctggcaacagcaaaagtggtgaagctgtttcgggagatgggattgaaggaatcgacaggtgcaaaaatcggggtgattctcaatccagaagtgacgtatgcaagatcctctgccccgcatgatcaagaagcggcacggatgtatgatttgtttttcaatcgaatgttcttagatccctccatcaaaggggagtatccagaggaattgctcgatgtgttgaaaaagcatgatattctttttgatgcgacagaggaagagcttcaggtcatcaagaatcatacggtcgatgtcgtcgggctcaacttatactatccgcatcgtgtcaaggcgccgagtaaggcgtggaacgaagggacgccatttcatccgtcttattattacgatatgtttgagcttccagggagaaaaatgaatccattcagaggctgggaaatctacccaaacattgtctatgatatggggatgagaataaaagaagaatacggaaatatcgagtggtttgtagccgaaaacgggatgggtgtagaaaaggaagaacggtttaaaaatgaagacggtatcattgatgatcagtatcgcatttcatttatcagccagcatttgaagcgggcacttcaagcgaaagcagaaggatcaaattgcacgggctatatgctgtgggcttttacggataatgtctcaccgatgaatgcctttaaaaaccgctacggattagtcgaaatccagctggaaaatgaacggaatcgccagttgaaagcatcagcgtattggtaccagacattaatcaaaacaagggaactgaaggttgaaacagaagtcatctatcgataggagtgatggaatatgaaacgaatcattctcgcttgtgccgcaggaatgtcgacgtccattgtagtgtccaaaatgaaggctgctgcagaagctaaagagctggattatgatatctacgccatacctgaaggggccattgcggatgaattagaagagcatggaggagatgttcaggtgattttacttggaccgcaagtaagctttatgaaaaaggcagcagaaaaaaccgctgcaccttatcaaatacctgtcgatgtcatcaatgtgaaattatacggaacagcgaacggggaaaaaatactagagcatgctctgaaactagcaaatgaatcttaagtaattggaggagaagcagatgacggtattagaggaaatgcagggagcagcctttcaaatcattgctcatgcaggcgaggcaagaagccattatgtcgaagccattcgtctagcaagagctgatgattttgaaaaagcacagcagttgattgaaaaaggggaggaagcgtttcgaagcatccacaacctgcacttgccgctgatccaaaaagaggcggcaggtgagcagcttcccttttctttactgctgatacacgcagaagatcaaatgctcacaacagagaccattcatctgctcgccatcgaaatgatcgaaatgtgtaaaaaaatgaacgccctgtcaaaatagatatcagctattaaccaatttctgttataatcattcggtagatagagagaaagcaggattggtgaatgaaaaaaacatgtatgttgattgcggttggtcttttggtgctgctcatttcgggctgtatgggaacgaaggagcaaacgataggaaaccagcaagtagtcaaagaggaaaagggtccattactagcaaaagaaacagaagagattcagcagacagaagcagcagagattgatacacaaagctggattgagcaaaaggagccggtagagcttccgattttgatgtatcacagcatctccagcggcaactcgcttcgtgtaccaaagagcgagtttgcggctcatatgaaatggctgaaggacaacgactatgtcacgctgtcgccagaagaagcttaccgcgtcttcacaacaaatacgaagccaagtgaaaagtgtgtcctcattacattcgatgatggatataccgataactatacaaaggcattcccgattttaaagcagtatagaatgaaggcaacgattttcatgattgcgcaatccattgggcgcccgaaccacttaacggatgatcaaatggatgaaatgatagcaaatgggctttcgattgagagtcatacaattcatcatttagagctcaatcgtttatcaaaggagcagcagaaagaggaattaaaaggatcaaaggcattctttgatcaacgattttctcagcatacgagaatggtcagttatcctgttgggcgctataacgaagacacgctgaagctagcgaaggaagccggttatcaaatggctgtcaccactgaaccaggacatgcgaagaaggaacagggcatgatgtccttgcaccgtgttcgcgtgtcaccgggactttcacccgaaagctttggcagattggtagaggggaatcgatagagatcaaatcacaaatgtttcacatgaaacattttacgacaagtttcacggtgatgattggtgaatcgacatttgggtggttcaaaggcgaaacagaactttcatgaagatggaagttctgtttttttatcattcatcaaaaaattccatatgagctttttcttgcttgtaataatcgattcgatctttcatggtcccggtatgaaactcaaatttatgtccatcagggtccgtaaagtagatcgactgatgatctttttcatctctcggacggcctggcaagatgttgacgttcaaatgttttagcttgttgtacatgtgatctacatcctcttcatcaattgaaaaagcgatgtgcgtgtaagcgtgctgaatgtcttgacgaggaatgtctttttccacattcagtgcaagccatagcccgttcaaatcaaagtaagctgtcttttttccttttactaataaagtggcgtcaaatacgtttgtgtaaaaatcaatagaggtttctaaatcagaaacagaaaataacaaatgattgattccttttatcgacatcacattcacctcaaaacatatttgaaaaaaagcctgtagatggggtctacaagcttgtttattgataaacaggatagcccgttattttgatatctttccctagtggttctactgagagttgatccaattcgatggcatcactcatgaggcgtatgccttcgcctccaaaaaaggaaggggacagccgaccgccaatgagtttaggtgccatatagatgaccaatttatctacaagctgctgttctaaaaatgaggcattgacctggccgccgccttcaatcatgagggcggagacatttctttctcccagcacttgaagcacttcttgcaggggcacccgcgtgtcgctatctgttataaagacactgacgccagctgcttctaaagcggctcgttttccctcattggcttgctttgtcgtaaagatccatgtaggtgccgtctgatcagtgacgatctttgctgtcagcggtgttgacagcttagagtctaagacaattcgaatcggatgatgcccatttggaatccgtgcagttagtgaaggatcgtcatgaataacggtttgagcaccgaccaaaatcgcatcattgatactgcggatatgatgagcatcataacgagatgtttcagatgtaatccatttactgtcagacgtagcagacgcaatttttccgtctaaggtaatacctgccttgagcgtcacgaaaggtgtttttttcgtaataaaatgattaaatacttcattcatgagaatggattcctgttccagtacgcctgtaatcacttggatgccagcatcttgtaagatggcaatcccgcggcctgcgacaagcgggttcgggtcaagcgctgccacgacaacggtttcgacgcctgctttcacaagtgcttccgcgcaagggcctgtgcggccgtgatgggaacaaggctcgagggtcacataaatggtggctccttttgccttgtctccagccattttaagtgcatgaatttcagcatgcggttcaccggctttcatgtgagcaccgacaccaacaatttcattctctcgcacaatcacagccccgacgagcgggtttggagaggtctgacctttcattgcctgtgcattttcaagggctagattcatatatcgctcatgatgtggcaatcgtacgcacctcttgctccgccttcatgtgacctgagcggttgatttttgtctgtaagtatttttcattaaactccgagacatcaccccaaagcggaatgcgtccagaaagagatagacctgcatggctgatggcatctgtctttttcggattattggtaatgagtctgactggctttgtacgaagtgtttgaagaaccgcgatggcttcttcatattgacgcgtgtcatcttcaaagccgagtgcttcgttcgcttctactgtatcgtagccgttttcttgaagaatataagccatggctttactgaaaagtccaataccgcggccttcatgattggctaaatagaacagtgcacctgcaccattgtcttcaatcatccgcatggactgcttcaattggaacccgcagtcgcagcgcttgcttccgaaaatatcaccagtgtggcaaatggaatgcatgcggataagggcttcgtcagcgtgctcgaactccccatacactagaacgcttgactgctgatgatcggcaagctggcgggacgagaggctttcaattaaagcgtcatctgacaatggctcttttccatcgtcttttaaccatgaataccagttgaacatcacggttctgccgtctaaattcactggcaatttaatgggtccagtgatatatatatacccgtcttcttgctgtactcgtttgattttatcttttaaaatggctgttttaagatctgtgtgtttgtccatattctgcaccttcttttttgtctgtttcttcaatctgtaaacgaacgagaacgccaaatggatcaacaaattcgttacttttccctgttgttttcacttgagtgcctgcttttgtcagacgctcgacaacggactgtctgtctgcttcttgtgggaataccagtgtatagcttctaattcctgaaaaacgtggatcaatggctccttttcgtccccgtccccatgcattaaaggcaaggtgatggtggtacacaccagcggcgataaacaggcttgctggtggagccattctgatgtgaaaaccgagcgtattgacataaaaggaatcagcttcttctgggttaagatggaaatgtaagtgtcccataactgtaccagcgggaagtccttcccaagttgtatcagcggcttcttgcaggagaccatctccatcaagaggtgcatttccgccacctttcagttctccatgctcacctacccaaacgtcctcagggcgatcagcatatatttctacgccaatgccgtcagggtcacttaaataaatggcttcactgaaaaagtgatcgcttgctccaattaaaggatagccttttttgatcacatgtgccagccatgtgcccaggttttttctggtaggtaataaaacagcaaaatgataaagtcctggctcatgatcaggcttctccttgagctgtgcatcctcttttaacaaaagaatgggttcctttgcattgcttccaagagtgacggtggattccgtctgttctactattgtaaatcctaaaatgtctgtataaaaaggtaaagaacgctcaaagctggacacatgtaactctgttacacccaatcttagctcctcaattgtcttcaagctcggtcagctccttcatgatatatgcatcggcatgttcaaatgtttttgaaaatctataaaaatgaataccttgttacttaaagtaactaaactatataatagttagtgacttatttcaagtaattaattgtgctataatgaaaaaaaagagagaaaagcgggagggagtaaggtatggctcaagtagatggctgtccaatcacagatgccatggagattctaggcaagaagtgggtcattctcatcatcaatcagcttctgacaggccctaagcgtttctgtcagcttgaaaatgaaatggacatcagcggacgattattatcagaaaggctgaaggatttagaggctgaaggactcgttgagaaaaacgtataccctgacattccagtacggattgaatacgaattaacagcgcaagggaagaaaattgagccgattattcgtgaaatgtatgcttggtctttagaacgtaaaaacagcaaaaaaggggaacatgtcccttcctaatcgatttcgatcagtctgtctggtcgaaatttttttgtgcgattttccagaaatctaagtcaatagtatgaaaaatgatgttgacaataaattcattcatcatataatatcaaggagaagagggttcttttccctgtaatggaatggaggttatgccatggtatcatgaatgggacagattacctaaaacacgtttcaaaccatcatttagaaacagacatctttggcttttaggaagcaaagatttattttttcaactcaattgataatgattatcataatcatctataagtgtgatccagcgcttatgaaggttattttttttattgtctattgagaataattatcaatatcatttaggagggttcacatgaaagccattcgttcaacatcacacgtattattgttctttagttttgttctattatttgccctagccccggttagctcagcctcagcagcaggcttagcagatggtcaacattcagcacaatatgtggtatggaaggcagatagcgattcgacttcaacagcgaatacgtattttgaaaaaccagccaagcttgtcgtgaagaatggaaaaatcaaagcacaagtcacgttaacgaatagctcttggatcacaagctttaaaacacttgatcaaggtgtgtacaaagatgcgaaggtgatcagtacaaatacagctgcaaataagagaacggttgaattcaacgtgaacagcctgacagaagtcgtaccagcaaaagtgagcgtgactgtaccggtcatcggatatacaggcaattacgacatccgcctcaagtttgatgcagcatctgttcaatagaaagggaggaaattcgcttgatgaaaaaaatgatgaggctatcagtcttcatgaccgctttattattggcacttatgctgcctttttcaaacgcacaggctgccacgttaaaggatggtacatactccgtcaactatactgtgctgaaggctgaaggaaatgcggtttccatggcaaatgattactggctgaagccagcaaaagtgattgcaaaaaatgggaagctgactgtacaaatgaccattaaaaatagcagctgggtgacggaatttaaagtgccgggaaatggcggctatgtcgacacaacggttctctcaactaataaaaaagccaacacaaggcttgttcagttccaagctcagagcttgtctaagccaatcaagtcaaaaattcatgtcactgttaaatctgctgattatgatcatgattataccattcagctgaaattcgatgagagcagcatgaaatcgctttcgtctaacagcacaaacaaatcagcgggtgcagcagaagatcagcagccatcaaaagaatcaacgaaaacatctgattcatccacgacaaaacaagaagagaatcctcaaactggtgatacaaaccagacagggtggctccttgtgcttgctctatgctcaggcgggtttttagcaagaaagtggatcatcaagcattaagaaaggaagtgtcaccatttgaaacgtctttttcatctaaaggcagctattctgctcgttttattcagtttattgactgcgtttcagattcctcaaggaacggctcaagcggcatcatttgttgatggtgaatacacggccggattcaccattttaaagaatggcagcacagaagcgtccatgatggatacgtatacagaaaagccagctaagctgattgtggagaatggcaagacaacagcctatgtcacgctgaagcaaagcaaagagattacagatttcaaagttgaacaaaatggtgctcttgtcaccactgaaaccgtcagtgaggatgaaacagccaatacacgtgtgatcaaatttgatgttgctgacttatcagccaaattaaacggctgggtgaaaatttactgggatttaggcggctttatttatgacgaagcgtatgacgtacagcttgcattcgatcaaagcagcctaacactcgttacacctgcaaagccagacgataacgaaacaaaaccggatgaccaaaacgggtcaaagccagacgataatgaaacaaagccggatgatcaaaacgggtcaaagccagacgataacgaaacaaagccggatgatcaaaatgggacaaagccagacgatcatcaggcaacacctggcaataacaatggcacaaaaccagatgattctgcgcaaaatcaattaaaagatggcgaataccgcatcaattacagtgtgctgaaaggggatcaggacgaggcatctcggatgaaccaatacttctcacatcctgcatccttaaccatcaaaaatggaaaacaaaccatttcctttacggtgaaggatcatacgtctgtcgcttccttgaaaacagagaaaaacggatcttatcaagaagtgaagacggtcagcacagataaagcaaagaacacaagagtggtgtcatttgatgtcgctgatctgaaaaaagcggtcaaaggaaaagtacacatcgtggtagcagctgctcactatgaccaaacctacgatattcgttttcaattcgatgcaaagagtatcgctccacttaaggacgggcaggtagaggaagaaacaccggctgcaccagaaacaccaaaaccaaacacaccatcaccagaaacaaataacggcggagctgctcaagagacggctaagcttaaagatggtgtatacaagctgcctttctcaatgaagaaagcagacaaggatgagccttctcgtatgaacgattacgtcgtgagccctgcgacattggtcgtaaaaaatggccgccatttcgtttcatatacagtgaagaacagctcagccatcacatccttccaagtagggacaggcgggaaatatgaagagactcttgtcgcaaaaacagatcaaaaagcagacacacgagtgattcaatatgaagccaaaagtttaagcactgctcaagcagcacgcgtaaaaattgatattccggctgcgaattatcatgagcagtacgatgtcaaacttgtctatgacacaaaaggaatcactcttggtgaaggaagcggcattgctatggtaatcggagacgatgagagtatcggctttgtcaaaaatccaaatgatcgcgattctcaaacaaatcagcttgaaaatctagcgccagaggaaacaggcgcagagcagatgacatttactccatcagatgaccaaaccaagtctgagactggacagttgaatccgaaaacaggagatacctctcttttttgggtgtatattcttttattcggcgggtcattattcgtactcgtaagaaagtatcaaacaagaacaagatagatggattagtttaagtgagatgcgcaatttctctcggcgcatccactctcttttttcgaaaggaggcttctgtttttgaagcatcgaatgttatgtaccctgatcgctgctcttagtgtgtgcgtgatcttatcgggctgctcacagtcagccgaaagttcagcgaaaggcaaaaaaagcgcagaatcaagtgcgcgcattgtggcaacgactgtagctgctgtggagattatggatgctttagaggtggatcttgtcggggtgccaacaagtcaaaaatccttgccagctcgttataaaggactgccggaagtcggtaatccaatgagcccggacatggaaatcatccaatcacttaaaccgacagatgtcctgtctgtcacaacccttcaatatgatttagagacaccctttcagcaagcaggtgtccctgccacatacttaaatctcgagagccttggtagcatggagaaggcgatcacgaagtttggagctcagtatgacagaaagaaacaagccgagcgcatcgtgtctgactttgaacaaaaaaagaaagacatacaagagaagacgaagggaaagcgcaagccgtccgttctgattttgcttggtgtaccgggcagttatttggtggcaacagagaattcatatattggtgatcttgtacgtatcgcaggcggaaagaacattgtcaaaggtgagaaaatggagtatttggcatctaatacggagtatttacaaaaagccaatccagatatcatactccgggccgcacatgggatgccagatgaagttgtccgcatgtttgatcaagaatttaaaacaaatgacatctggaagcattttcatgcggtcaagcaagaccgggtgtacgacctcgaagaaagcttatttgggacaacgggcaatttaaaggcagcagaagcattagatgaactaacgcgtatgctctacccgtcataagcggcgaatcttaatgataaaaggacgttcaagatgaaaaaaacagggattttatttctgatagttagtctcttactggtgtgcgtgtttatttattccgccattactgggagtattcatgtcaccccgattgaattattggaagggctcatcaccggtcaacatgcacaggtagacatcattaaagatttgagaattccccgcatgctcatcgcaatgtttacaggggccgccttatctgtctccggtgtactgctgcagtcggtcatgagaaatccattagctgatgccggcgtcattggaatttcatcaggagccagcttcttttctttaatggcgattacagcgcttcctcaattttatttctactctcctttattttcggtattaggcggagccattgcatgtttcctcgtgtacgttctgtcttggaagggcggtttaagcccaatccgcatgattttggttgggatcgccatcaatgccatgtttactggaatggctgaagcatttgtgaccatttgcagctatttcaatatcacgatcaatcagtcaggacagtcaaatctcacgatgaaaacgtggggagatgtccgtttaatcggagtctatggcgtcgtcggccttgtcgtagcacttttcttcagcagatggtgtaacctcttggctcttcaggacaagacagcgaaaaatttaggattgcgtgtgaccagaatgcgccttttgatttccatcacagcggtattactcgcggcggtgacagctgcggtagcgggcgtgattgcctttgtcggtttgctcattccgcacatttcaagaaggcttgttggctcggatcatcgggtactcattcctttttctgcgttaagcggggctttgctgattttgacggctgatacgctcggcaggacgcttgtagcgccaaatgagattcctgcttctacgatcatggccgtgattggcgggccgtttctgatctttttgttaagaaggggggaccgtctccatggacattcgtgaggtgtcattctcatatgaccagcagaaggacatcgttcaatcggtcacaacacagatcgaaaaggggaaaatcacaaccattatcggtccaaatggctcggggaaatccacactgctttccttgatggcgaataatcattgtccaaacaaagggcagattcacttagacggacaagcgctgaatgcatttaagccaaaggagctggcaaaaaagctggctgtcgtccatcagcaaaatgaagcaccgcttgatttaacgatcgaacgggtcgtggcattcggtagaacgccgtaccagacgatgcgcgggggtgacaaggaagaggatgagagagcgatagagtgggcactgtccagtacaaaactaacggaaaaacgaaaggtgccgctcgcctcactgtcaggtggtgagcgtcagcgtgtatggattgcgatggcacttgcgcaaaaaacaccgatccttttcttagatgaaccgacaacctatttggatatctactatcaatttgacattcttgagctgatccgtgagctcaatgtcgtgcatggactcacgattgtcatggtgctgcacgacatgaatcaggctgtccgatacagtgacgtcatcattgcgatgaaggatggacgaattatcagtgaaggacagccaaacgatgtgttaacagaagagaatgtgcggcacatttatgatgtgtccgtcacgattagacaggatgcagaaacaggaatgtacatcgtgcctgttggcatataaaagcaggtgaaacagtgtgaaaagaggaaaacgggtctggcagcgtatgctgacgatcgtctgtttaggtgtattcatttatagcggtacagccattggtttagaactgttcggctattatcaaaatcgtcaggtgcttgcaaaggctcagacgatgtatggtcaagagcaaggaatgactgaaagccgggaaccgggaaccacccgtacgtcatttgatgagctgcggaaggtgaacaacgacattgtcggctggatcaatatgaaggacacgatgattcagtacccaatcgttcaatctcgtgataatgcattctacttaacccgtaattacttaaaaaacgacacccgggcaggcagtatctttatggattatcgcaatgacgtcttgcatgaaagcccgaatactgtggtgtacgggcatcggatgagggatggatccatgttcgctggactcacaaactatttaaaaaaggatttcttccatgatcatcggacatttcagtacgatacgctgtatcaaagctatgaggcggagatttttgccgtgtatgaaacaacggtggatttcgattatattcaaaccgattttcaagatcttggcgaatatgcgcactacttacaagctgtgcggaaaaaatcaatctatcaaacgaagacagacgtgtccacagatgacctcatcctcaccttatcgacttgtgatcatgtgcttgcacctaaaaatgggcgtcttgtcgtacaggcaaagctaaagaaagtttactagaaaaggagagacagacggttgaaattttcacatgtgatcttcgctggactcgtcttgatgcttctcctcggcggatgcagtcaggcagcacctgtagagaaaggaagcgggcaaggtgcgctgaagataaaggattttactggcagaacgctgtcgtttgaagaatcccctcagcgtatcgtcgcattatcgactggagacatgagcatcctgtatgccttaggcggtgaggtagttggccgtccggccgccgaattaccagacagcttacaacaggcaaagtccgtccaaacaattggcacaacgcatcaatttgatgtagagctcatcacaagcttaaagcccgatgttgtgcttgggaatgaacaattaaacagcaaggacatctctacaatagatggaattggttcacagcttcttttgacaagtgccaattcagtgaaggatattcagcgtcaaataacgttattcggggatttgctcggaaagcagcaaaaggccaaagccctcaatgagcaaatcgatcagaggaaaaagcaggtcaagcagcctcagaaaaaagtgaagacactcgttgtatacggggcacctggcacatatatggcggcacttcctcaatccttaagcggagatttactgcacatcgcaggagggacgaacatcgctgaaaatgaaccggcactcgagaaattccctcaatacgctcaaatcaatgcagaaaaggtcatcgaagccgatcctgatcttattctgcttatgactcacagcaatcctgaagatgtgaaagcgggctttatgagtgaaatgaaacagaatgccgcttggcacgatgtgtcagctgtgaaaaatggacacgtcgagattctgcctagtgatctatttgggacgaacccaggcgcggaagtgatgagagcgattgatgagctagagaaaagattgaagcgattgtcatcatgaaaatgaatgcagagttagattttcaaaaaagacagtcgaggcgaaaatggctgatacccggactattattctcgttagttgtaggtgcatgcctagggcttgcattaggttctgttcaattatcgctgcaagacctactcgccgctttgatgggatcaggccagcctgtccatgagaaaattgtgatggatttacgtctgccgcgtgttttgatcggttttattgtcggagcctgtctcgcggcatcaggggcgattttacaaggagtcgtccggaatccactcgctgaccctggcatcatcggtgtgactgctggcggcggattggctgctgtgttcagcatgattgtgtttccgcaatttacgtatttgctgccagctgctgctttccttggcgctttattagcggcactcgtggtgtatatgctgtcatttgatcaaggggtttccccgctgaaattgattttggcgggagtggcagtcaatgccctccttggggcggttatgaatgggtttatggtgctttatagtgagcgtgtgcaggctgttctgccttttttatccggaggattaaatggacggagctggcatcatctaagcttcgtgtcgccatatgcgcttgctgggttgtgcctttgtttttttgccatcaagccggcaaaccttcttttgcttggtgatgaatcggcgcagttactcggccttagagtagagcgcacccggtttttcttaattgcgctggcggcgcttttagctggtgcagctgtaagtgtgagcggcttaattggatttgtcgggctggtcgttcctcattttatccgtcttttaattggagatgactaccggtacctgctgcctatctcaatgctgggcggaggcgtacttgtggtttttgcagatacagcggcacgggtatggtttacaccggttgaactgcctgtcggtatcctgcttgcctgcatcggtgcacctttcttcctctatttattaaaaaagaaagggaggggttaagttgaatgtgatagctatggatgacgtgagtctcagtcaaggaggctttcggctgtcgtctatttcagcagctgttcctaaaggaagtgtgacaggaattattggaccaaatggatcagggaagtcgacttttattaaagcagccgcacgtcttacatcgatcgaaagcggcatgatatacattcacgatataccgcaaaaagagatgacagctcaggagattgcaaaggaaatcgccgttctcatgcagacgagaacagccattccatctatgaccgtacgggagctggtcgcacttggacgcagtccgcatcgttcgatctggaaaaagagctcgaagacagatcaagaagcgattgagtgggcgcttgatgtgaccaatagccgcatcaatgaaaacagaatgctgcatacattgtcaggcggagaaagacaaaaggcgtatattgcgatggcgctcgctcagaagacagagactttgattctggatgagccgacgacttacctagatattgcacatcagcttgatttactagagctgctcaaacagctgaataagacgcatggaatcaccattttaatggttcttcacgacctgcagcaggcagcaaaatattgtgaccgcctcattgcgatgaagggtggtcaggtttatcaaatagggacaccaaacgaagtattaacagaaagctttttcaaagaagtctttgggattcaggctgaggttcacttagacggtgagcatccgctcattatcccaatcgcttcgatccaacaacaaaagggagatgaacagaaaatgatcattgtcaacaaccaggtaagagtagaaaaaggcagtgctgaccacctcgtcaagcgttttaacaagcagggacaagtagaattcatggaaggatttttaggcatggaagtatgggtcacgcagcagacaaccgattacgatgaagtgaccattcatacccgctggaatcgaaaagaagactttgtgaactggacaaaatctcaggcatttggtgatgcgcacgctcatgggaaagcaaaacctgaaggactattaaaaaacaaaattacgtactacgaagtgcaagtcactagaccagctttacagaaaaaagcctaaaaaagaaacatagcgctgcggttcatgtgcagcgctatgtttttgcgtttttttactttctgtcacatatctttgacaaagtattcaaacaactgacacaataccatccaatttttaggtaaaatttactttatttttgaagcgcatgggtgtaaagtacaggtataaataactaaccgaatgaaaagcaagagtaaaatttcaccgagtaaaccatttcaaacaggctattatttgtgaatcattgaacaaatagtgaatattttgtgaagtggtgagcatagttgtttcgaatcattcggcatgtgaaagtaagggaggatgtaaggctgtgagtgagctgtttttagcaagatttcaatttgcttcaacgacattatttcattttatttttgttcctatgtcaataggtttggtgtttatcgtcgccttgatgcagaccctttatgtcgtcaagaaaaaagagatttataaaaaaatggcgaagttttggggtcatctattcttactcaattttgcagtaggtgtggtgacagggattttgcaggaattccagtttgggatgaactggtcagattattcaaggtttgtcggtgatgtgtttggtgcaccgcttgccattgaagcactgctcgcctttttccttgaatctacatttattggactttggatattcggctgggatcgtctgccgaagaagattcatttattgtgtatttggcttgtttctcttggtacgatcttttcggcgttttggattctactcgccaactcatttatgcaagagccagttggatttgtcattaaaaatggccgcgcagaaatgaatgattttggcgctcttgtaacgaacccgcagctttgggttgaattcccgcacgttctgtttggtgcgctggctacaggtgcattctttattgcaggagttagtgcctataaaatgatcaaaaaacaagaaatcgcctttttcaaaaaatcattccagattgccatggtcctcgctttaatttctggcttaggtgtggcgttctctggacatgatcaagcgaagcacttaatgaaatcacagccgatgaagatggcagcaagtgaagccctttggaaggatagtggagatccagcggcttggacactatttgccaatattgacacagataaaaaagaaaactctgcggagatcaatattccgtttgctttaagttacttggcttatcagaagttcagtggagatgtgccaggcatgctgacacttcaaaaagaatatgaagcaaagtttggccctggagactacattccgccagtgaaaacaaccttctggagctttagaatcatggttggtgccggaatgctgatgatttttgccagtatgattggcttgtacttgagctttagaaagaaactcgaaacgaacaaatggtttttacgcttcatggtagggatgattgcgttcccgtttattgcgaactcagctggctggatcatgactgaaattgggcgtcagccgtggactgtctttggtatgatgacgacggctcaatcgatttcgccaaacgtatcgtatggcatgctgttattctcagtcattagctttacgacgatttatctgattcttgccatcttgcttgcctacctattcattcgagaaattaaaaaaggtgcacattcggaagaggatacagatcaaaaggatgaaacggacctgtctacagatccatttgatggaggcgcatatcatggcatatcttaacgagatttggtttattcttgtcgcagtattgtttgttggatttttcttcttagagggatttgattttggtgttgggatgtccatgcagctgcttggaaaggatgcgcacgaacgccgcattttaattaatacgattggtcctttctgggatgcgaatgaggtctggctgattacagctgggggcgctattttcgctgcattccctcactggtatgccacgatgttcagtggatactatataccatttgcggttctcctcttagcgctcattgggcgcggagtcgcctttgaattccgagggaaggtggagaaagcctcttggatcaaagcatgggactgggtcatcttctttggcagtctgctgccgccgtttttactcggtgtgctattcacgagtattttacgcgggatgccaattgatcaagacatgaatatgtatgctggttttacggattttgtgaacctttattcagtgattggcgggttagctgtgacggttctttgccttctgcacggattgattttcgtcacactacgtacagagggtgatttaagagatcgtgcaagaaagcttggcaagcgtgtcctgcttattgcgctgccagttcttgtcctatttgtcggtgtatctatcatggaaacagacatttatacggtacgcccgatcatcaccattccgttaactgtcctgattgtggtttgttacgtcgcggctctattctttatgaaaaaagaacgtgatggctggacattcttattcacaggtgcaggcatcatggtgacagtgacgatgcttttcactgcattgttcccgcgcgtcatgattagctcaatcaaccatacgtttgatcttaccattcaaaacgctgcatccggatcatattcactgacggtgatgacgattgttgccatttctttgctgccctttgtgcttgggtatcaaatttggagctattacgtcttccgtaaacgtgtaagcggtaaggagccaatgacctactaatggataaacgtttgcttcaattaaaaggaatgagggggcttctcgccctcttaggtattgtgtcactcatccaaggagcaagtattattttccaagcacagtggctggcacatgccattactacgctgtttgacgggaaaagcctttcgcaggcaacgccttatgtcctgctgtttcttgctgcctttctggtgcggcacggtctcaccttgattcgggagaaggtcatgtttacctactcttcccgaattggagcagacgtcagaaaacagctgttagaccaactctttcgtttaggtccagcttttacaaagaaaaaaggtacaggaaagcttgtcacattagcgatggaggggattgctcaatatcgtcagtatttacagctatttttaccgaaaatggtgaacatggcagtgataccggctatggttctcatctatgtttggacattagacgaaacatctgccgtcattttaatcgtgacgctgccgattttaattatctttatgattttgctaggccttgtcgctcagcgtaaagcggccaaacaatggagatcgtatgagaaattatccaatcattttactgattctctccgcggccttgaaacgcttcgttacttaggcattagcaaaaaacattcccgcaatatcggggaagtgtcaaagcgatatcgaaaggcgaccatgagcacgctgcaggttgcatttctttcatcatttgcgcttgatttcttttccatgctgtcgattgcaaccgtcgctgtctttcttggcttgcgattaattgaaggagagcttctgttattgccggctctgacggcgctcatgctggcgccggaatatttcctgccagtacgtgaagtgggaaatgattatcatgcgacgctaaatgggaaagaagcgaatgaagcgatgcaggtcattttagaagaaaagggcttccgcgcgcaggagacacaatcagtgcaactagatgagtggaatgaacagtctgcgctcacgctgcaagatgttagtgtccagcatgatgaacatgccccttattcgattcaggatgtagacctcactgtcaaagggaagaaaaaaatcgggatcattggtgccagtggttcagggaaatcgacgttaaccgatgtgctcggcggctttgttgaaccgacctcaggtcaaatcacgctaaacggccagccgcttgttcatttacagatgaaggaatggcaaaaggaagtcgtctatatgccgcagcacccttatttatttcacatgacattgagagaaaacattcgtttttatgaaccgcatgccgcagatgaagaagtggaaagagctgtctgtgaagctggattatctcagctcgtagcgcagctgccaaatggtctcgatgaggtcattggagaacagggaagaggactaagcggcggacaggcgcaaagaattgcgcttgcgcgaacggtgctgggccagcggtcaattatgctgttagatgaaccaacggcgcatctcgatattgagacagagtatgaattgaagaaaacaatgcttccgctgtttgaagataaacttgtgttcttagcgacacataggcttcattggatgccagacatggatgagatcattgtcatggatcatggaacaattgcagaaatgggtacacatgaatcattgatgcaaagaaaaggcgtgtattatcaattggtacaggagcaaatgggggcggtcacacatggtcagtaaaggctggtttataccttatatcaaggagaatcaaaagctgtttgcgctggttttgtttctaggggcaattgcagtattctctgcttctatgctgatgtttacgtcaggatttctcatttcaaaagctgccacaagacctgagaatatactcatggtctacgtcccaattgtagctgtacggacctttggtatttcacgctcagctgcccgctatgcagaaagactggcgagccaccagctcattttgaccatgattgaaaaaatgcgtgtccgtctgtatgacatggctgaacgaagtgcgaaacagacaaagctgggtacaggtgaaatgcttgggctcctgtcagatgatgtcgagagactgcaggacgcctatttaaaaaccatctttccatccatcggggcgctgcttttatatgccgcatccattggggcacttggtctattctcgtggccttttgctggactgatgctgctttatatggcacttctcgtatttgttttcccatacgtcacagtgctagtgaaccgggcgagacaaattcaaatgaaaaaaggcagaaatgaactgtacagccatttaacagatgcagtcatgggcgttagtgactggctgtttagcggcaggcagaaagattttgttgatgaatatgaacagaaagaagcgaaactgttagcgcttgaagcagccaagcaccggtttatccgtctgcgccagttttttgcccagcttatgattggaggagctgtcgtgcttgtcgtgtattggagcggttcggtcgttcagtcaggctcgatgtcacacacactgattgcagcctttgtgcttgtgctatttccgttaacagaagcctttcttccactctcagatgcagcaggtgatattcccgtctatcagcatgctgtcagcagattaaatcattatgaaaagctttcgtatgaaggagaatctgagcgcaagacagtggatcagtcaaccatttctcacgatcaagctgtctgttttgatcaagtgtcctttgggtatgattcgcaccaacacgtgctaaagcatctctcattttcactgaagcaaggtgaatcacttgctctcttaggaaaaagtggtgcaggaaaatcgactattttgaaattgttagaaggagctgtcgtgccaaatcaaggagctgtcagtatccaggggaaaccggtagaaagcattcgagaaaccgtgtccacctatgtgtcagtgctcaatcaacagccgtatttattcgatacctctgttttaaacaatattcgcttaggctctccagatgcgacagaagagcaagtaaaagaagcagcgaggcaagtgcagctgcacgataccatcgaatccttgccagaaggttatcacaccggtgtgcaggagacaggggttcgtttctcaggtggagaaagacaacggatggcattagcccggattttgctgcaaaacaccccgattgttgtattagatgagcccaccgtcggacttgatccgcgcacagagcgtgagctgcttgaaaccatctttcgtgtgttaaaaggaaaaacggtcatttggattacccatcatctcactggctgtgaggcatgtgaccgcattatgtttattgaagatggacaaattgagatgcagggggagcatcaggatttactgagagaaaacctgcgctatcaaaaattgtatgagatggatcgtccattttctacaatataaataaacgaaataacaagaacgttcggacagagatctctgcccgaacgttttgtggttttaagggtttacctttccaacaccagcatttgataccacttctgatttgacattgttcacgttaagcaaagagtagtgataaggagggttgtacgtacctgttgaagacgttggcagactgcctgtgctgttaataaatgagttgttgatgacatgccatgtaccgacttgacggctgtcccagctgccgatcgcattatttgtattttcaaatacgttgtgctcaattctcatcttcgcgcccatacgagagttgatcgctgtggtatgaatgcctttatagtagttgttatacacatgaccttccccgtagcgcatagacggtacacgagaattcaggttttcaaaacggttgttatggaacgtaatttttcggttgtagttgtcgttatcagagctgcccatgagcatcgttttccagctgtcatgtacatagttccatgagaaggtaatatagtcggagtcttttttcacatcaaataatccatcataatcatctttcccagagtttaatgtgttgtacagctcattatgatcgacccatacgtttttagaagcgccttcgattccgatggcatccttgtcaccgatgttactgtgatggattttcaggttgcggataatgacgttattggaacgccatactttgataccaattccattaaattcacctttcgtgcctttgccgacgatcgagacattgtttgtatctttcacatcgattttattggcagatgtattagaagggttaatcgtcccgtcgacaacaatttttaatttttcgtttgttcctttacttttgagggcagccaatagttcatttccagttttgactgtgacggttttaccgccttcaccgcctgttgtaccgccatttaatgtggagaatccttgttgattaaaattggccataatagaagggctttctggatacttggctgccgcttttgcctccccattaggtgcaaataatgaagtcacgagaccaaccgctaacacaccagctaacattggaacttttttcttcaaagtcaacatctccattctattttgttttaatgtaaacgtttccaaaaataagctgcaattcaactgccccccctttcttcgccagtatcgcctttttcggaatgtaggaagagcatagcacgcaaaaaggtatcatcggctaagaattggcgctgtgtattccatgattttctaggaaactaaggccatgattattttattttcatctaaatgagacaaggatcattgacgataggtattgggatgacctagtgattatgagggagagtctcttcgcttgatagaaaatcaagatgattacgaacgcaccattttgttagggacgaaagaatgtcataatcattacataagaaaaaattggatataaaatgaatcaaatactggatcaacagggagaaaaggagccaagttaaaaaaattaagtctattttgaacgatgtcgtcatccgtgtcgtcacaagaataagagaagaaaaggaaggaggggtgtgtttggagcagacagaagagacattattgattcagcgggcaaaacagggagatgatgctgcatttacagccctttatcgtcatcattattcctttctttaccgttatataatgaagctcacccttcaacaagagctggcagaagaaatcatgcaagaaacgatgctgaaagcgtacatgaaactttcttcatttagaggagattccttattttcaacatggctcatttccattgcatctagacaatttttagatcaccagaagaaaagaaaacgtgaacaattaagagaagggaaggcgaatcaagagaccatacgccgcttcaaatgggacattcagcaaaagggccacacatggcatgagatgtgggatgctctaaacgaattgaaggcacaggagagagcaccgattattttgcactattattatggctttacttatccagagattgcttcaatgctcggtacgagagaaggcactgtgaagtcgagggttcatcatggattaaagaaaattcgaaaggagtggtctcaatgaaggaagatcagttcaccgaacgtttaaaggaagagttacagcagctagatgaacaaattgaagtgaaagagccaagtgagcaggctgtcatgatgatgctgaagcaggcaaaggaacaagagaaaaggcgttttaaacaagaagtactggcgtacgttctcatcagtctgaccattctggcactatttgtcgctgtcatcacccatttgcctatcatcttcattcttcttcaagtagtgagtgtgccgctctgcgtcgttgtcggcatcaaggaatatcaacacattaaaggagggtcttccttatgagtcagacggagatgatcatcttattgtgcgcattgccgttattgtttgcgcaggggcttcttttatttatggatgcaaagaaaagagggcgctataagtggttttggggcattgtcggtttaattaatttcccatcgtcttctattttatattggctttgtgtcgtgtaccctgatcgaaagaaagatgagaagatccgaaaagattgagcggacggcctataaaactttaggcctttttttcgggttgaagatcaactagaaatcattcatgattcatctatttgtcaaagagtgcgggatatataacgtctaaatcatcatttctagcacaatagtcattctgcaagagatactttctaaaaacgattgctgcggctgcttgatccatctcaaatcggcatcattttcatctgttatcagtattgatcagattttacaaatggtgttaaattaatctcaatatgcgttagaaaatctaacagataaatgtgtgaagatatctacaaggaggcagatgagacatgttgaccttagatcgagcagcacaaacagcacaaagctacatcgaccgtgtgttagaggaggtggaaaaacgaaatcctggtgaggaggaatttcagcaagccgtaaaagaaattctagaatcactcgttcctgtttttgcaaaacacccagagtatgaaaaacagggcattttagaacgactcattgagcctgagcggcttgtggtatttcgtgtaccttgggtagatgatgaggggaaagtacaagtcaatcggggtttcagggttcaattcaatagtgccatcggtccttataaaggaggcattcgattccacccatctgtcaatgcaagcattattaagtttttaggatttgaacaaatctttaaaaacgcactgactggtatgccgatcggcgggggaaaaggtggatcagattttgaccctaaagggaaatctgatggagaaatcatgcgtttcgtccaaagctttatgagtgaactcagccgatatattggacctgatcaagatgtaccagcaggtgatattggcgtaggggcacgcgaaattggctatatgttcggacagtacaagaaaatgcgcggtgcttatgaggcgggtgtgctcacagggaaaagtcctggatttggaggcagcttagcgagaaaagaagcgacaggctatggactggtgtactttatggaagaaatgttaaaagcgcatggactgcaatttgaagggcattcagttgttgtgtctggatcagggaatgtgtctatttatgcgatggaaaaggtcatggagctaggcggtaaggtcgttgcttgcagtgattcaagcggagcgatttatgatcctcaaggcatttcacttgagactgtgaagcagctaaaggaagtgagcaatcaacggattggggcatacatagacattcacccgcatgccgaattgattgaagattgtgaacaaatttggtctgttccttgtgatattgcgcttccatgtgcaacgcaaaatgaaatatctgagatgcaagcgcagcagctcgtggaaaatggtgtcattgcggtaggagaaggagcgaatatgccttctactctaaaggcagtcaaagtttttgaacagaatgatattctatttgcgccggcaaaagcggcgaatgctggcggggtaggtgtctcagcactggaaatggcacaaaatagtgcaagaatgtcttggacatttgaagaagtagatgatcagctgaaacaaatgatgcagacgatttatcgtcagtgtacagagacagcagacgaatatggacactctggaaacttaatcgtaggagcaaatattgcaggatttcgcaaagtggcagatgcgatgatcgcacaaggcgtgatttaactcctgctctcccgcacctgtttatttcatgacaagatggggaatcgtccttgtaagaatgacaataaggaggcgcgggagaaatgaaaaaatggctgaaacaaattgtcaaatgggcaccagtgatttatccagtggtgaggaaaatatataaagagcgaaaagcatctaaacgtcgtaacgtatcagccggataatccggctttttttatgcaagcattaccgattgagccctgaacgaaaaaataatagatttgaatgatccatttcatgcttctctccgttaagtacataacaaacggaaagaggaggcaataacagatgaacatgaaaaaagcgattttaactatcccgcttagcgcagcattactatatttccggcagctcatatcgcaagtgcacgcgaaggacatatgcatggagaggaaaagaagacgtcttcgtcacaagaagtgtcaaacaaagcaaccgatcttcgagcagcactagaccagctgttttcggagcatgcttatttagcagtgatcacgatgcaaaagggaattgacggcagtaaagattttgatcaagcagcggcagcgttaaatgacaacacgaatgacttatcagatgccatcgcctctgtgtacggaaaaaaagcagggaaacaattcaaagacagttggtcaagccatatcggttacttagttgattaagtacaagcaacggcaaagaaagatgaagcaggtaaaaagaaagcagtcaagcagcttgaccaatatcgtatgaaacaagccgatatgctcgatcaagcaacagacgggagattgaaagcaagtgaacttgaagaaggcttgaagatgcatgtgaatgaactgctaaaagcgtttgacagctacacagaaaaggattttgatacgacctatgaaaccgttagaaagtccattcatcatatgtttgaagtaggcaaaggcgtatcgtgggcgatcacagatcaatttcctgggaaatttgatcataaatcagtcgatacaccagctgcagatcttcgtgaagatttaaactacttgttctcagagcatttggcacttgcagtcgttgccatgcaaaaaggaaatgatggcagcaaggactttgatcaagcagccgcagctttgaacgaaaacacgaatgatttatctgatgcgattgcatctgtttatggtaaggatgcaggaaaacaattcaaagccatttggtcaagccatatcggctactttgttgattatgtcaaagcggatgcatcaggagacaaagaagcgaaagaaaaagctgtgaaaaacttagatgcgtatcggatgaagcaagttaaattctagatcaagcgacagatggacgtttgaaggcggcggatttagaagctggcttgaaaatgcatattgatgagctgatcaaaacatatacgtcttaccataatggcgaatatgatcagctttatccaacagtgagagaagcgtacggtcatatgttcatagtcggtcaagatgtcgcagcagcgattgttgatcagcatcctgaactgttcaaatccaacatgcctaatgaaatgccgaaaacaggtatgggaggcacagccggtcctttaggtatgtcatatgaagcatttgcgggaatgatcgcaagtttgatcctagccggcggtgcagcgggtgcgttcttccttactcgccgtaagacatcaaattaagctcgtataaaaaggaaaggggaacgtgcacaatcgtgccgttcctttctttaaaaggaggcagactgacttgaaaaggtggttgtttggtcttctgatgcttctcatcatcacgggctgcgcatcacaatctatggttgattcgtcatcctctaaaacaacctcatctcctgaaaaaatgacaacaaaccaagccgcaaaacagtctcattcacaagacatgttaaaagacgaaccgtctggtattgtcccggctgaaattgcgattccggcgattgatgtcaaagcaaaagtggagaaaacaactttatcaaaggatggcagtatgggcgtcccaaaaaatacggacaacacagcttggtttaaagatggtccaaagccaggagataaaggaaatgccgtcatgaatggccatgttgataaataaatggggaccttctgttttttatcgattaaaggagctaaaaaagggaaacaaggtaatcgtgacgtcctcgtcaggaaaaaagcgaacttttgaagtgatcaaagtgcaaagctatccgcgtgaagaaaagccgaatgcgtttttcgggtacgcttttacacggaatctcaatttcattacgtgtacagggacatttgatcatgcagcagggactcatgaaaagagactggttgtctttacccagctgatcccttcataaaaaaggcgattacacggaggtgtagcgcctttttttatggtttctgccagagtcctacaaaaagattcataggtcattagatatggtttgttgtataaataggggcgtttgtcatataaatgagttggcaatttttatttcttttcagtagaatatgagtaatgaagagaactgcaagcgtatacaccctgtccagacaaggcagattctccacccttacataaggaggcgatctgatgctgagtaaaagactggcgcacatcttaagtcagctcatggcagcggagaccccgctcacaagcgctgcgctttctgtcagcttacaagtgacaagccgcaccattcgtacagacatcaaggaactgaacgaccgtctcgctccttatcaagcggctgtatcagctgttcgaggagctggctatgagctgttgatcaacgatgagaatgcctttcgccgttttatgaaagaggaggtcgaacaggaagagccactggctgttctgccggaggagcgcgttcggtttattttaaagaagctgcttctcgcagagtcttatgtgaaactggaagacttacaggatcagctgtttattagtaaatcgacgatgagtaacgatatgaaatgggtcaaacgcaagcttgagccctttgatctgaagctggaagcgaagccgaataaaggctgccggatcaaaggatcggagatgaaaattcgttattgtatgtcagaatatttattcaatgaacgccgttcctgccaaacgatgctgaacacagcagtcaccattttgccaaaacatgaattggaattgattcagaaaacaatgattgattatatcaatgaagaaagaatgaatctatcagacatttgcatgaataatttaatcgttcatgttgcgattgcctgcaaacggattagacacggaaactatgtatctgttttgccagaggaaatcaatgagataccacaggcaaaggaatataaggtcgctaaaaaaatggtggaacgccttgaaggactgctggacgtctcttttccacaagaggagatcgtctatatcgccattcatttattaggaacagccaaaatggtacagtccttttcatcgagtggtcaaaaacaaattgtggatgatgacacgagccgtcttgttcagcttatgctccaagccattgatcaaaaactgcagcttgatttagccggcgatgcggaattaatgattggactgagtctgcatttaaagccagctatgacccggtgtaaatatggaatgaacttaagaaatccgatgcttgatgaaataaaggcggggtatccacttgcttttgaagcaggtattatcgccagcagggtcctagaagaagaggaggggctgagtattcatgagaatgaaatcggatatatggcgcttcattttggtgcggctttagagaggaggaaaatggagattccgccgaagcgatgtctcattgtctgtgcatctggtgcagggagtgcaaggctgcttcaggatcgtttgcggtcacaatttgggtcaaaactgaccattttaggaacagcagagctttattcgcttccgcatgtgtctttacatgccctggatttgattattacaacggtcccgattcagatggatttaccgattccagtcatacaagtaaacaccattttgggaggaggcgactttttaaaaattgaagaagccctgacgagtgaaacaagggtgacattggcctctcaatatatgaaaaaggaattggtctttacaaaatgcgcctttcaaacaaaggaagaggtcatcacctttctcacggaaaaaatcatcgatatggggttagcaccagcagagcttacaccttctgtgatggaaagagaagaggctgcaccgacatccttcgggcattatacagccattccgcaccctatgacgccgctgacagaagagacgttttgggcgatatgtacattagaaaaaccgatcatatggggagagaaaaaagttcaatttgtctgcttgctttgtgtcgaaaaagagaatgccaaagatttaaaagggatgtaccgtctgctgggcgagcttgtgcataatgtgaaattcattcagcatctcatcgcctgtgatacatttgaagacatgctggatatcatgtataaaaaggtcccttcgtacaagaactaacagtgtgatcttaactttttccgcttcctaaaggaaaaagtataggtgtttatgaaagcggtttcataatatgatgaatgtgtaaagaaaagcttcacactttcaaaagggggcgtttacacatgaacatcttattggtttgtgcagcaggtatgtcaacaagcttactagtcacaaaaatggagaaaagcgcacaagaacaaggaaaagactatcgtatttgggcagtatcaggagattcagcaaaaagtcatattgatcaagccgatgtgcttttattaggaccacaggttcgatatttattaccacaaatgaaaaagctcggagaagaaaaaggaattccagtcgacgtcattaataccgtgcattatggcgtatgtaatggggctgaggttttaaaatctgctgaacagttagtgaacggataaagggggcggaagggatgaatggattcaaccgatttctagaagagaaggtcatgccgtttgcagggaagattgccgctcaaagacatttacaagcattgcgtgacggaattgttttaaccatgcctctcattattgtcggttcactgtttctcattttagccaaccttccgatcccaggatacagcgattttatggcaagtatctttggagctgaatgggccacgaaactatcctatcctgttaatgcaacctttgacattatggcacttgttgccaccttcgggattgcctacaggcttgctgaaaagtatgcagtggatgccctatcatctggtgcgatcgctgttgcagctttccttttggcgacaccatatcaagttcctttcacacctgaaggctcaacagaagccatcctagtaggtgggggaattccagtcacattgatgggcagtaaagggttattcgttgccatgattattgccatgctttcaactgaaatttaccgattcattgtccagcggaatatcgtcatcaggatgcctgatggtgtaccgccagcagtgagtaaatcgtttatcgcacttattccaggttttgtggtcatcacgctgatctgggtcgttagacttgtgattgagatgacaccatttgagagtattcataatatcatcacggtcttaattggcacaccgctttccattcttggtggaagcttaggcggaagtattgtcgccattggtgtgcaaatgctcctctgggcatgtggtattcacggagcaaccattgtcggcggcgtcatgggcccaatttggctcggtgcgatggatgagaaccgtctcgcattccaagcaggagaagtgctgccaaatatcttcacagcgcagttctttgaaatcttcatcaatgtcggcggaagcggtgcaacgcttgccttggtgctgacgatgatcttacgtgccagaagtaaacaaatgaaacagcttggccgacttgccattgggccagccatctttaacatcaacgaaccgatcatttttggaatgccgattgtcatgaacccaatgcttctcattccgtttatccttacgccaatcatgatgatcatcaccacatatatcggaatgagcacaggacttgtagcaaaaccggcggggattgctgtcccatggactatgccgcccatcatttcaggctatctcgccacaggaggcaaaatctctggtgctgtcatgcagctgattaacctggcgttgtcattcgctttatactacccattctttagaatgtgggataagcagaaattaaaagaagaaagtgagctagaaacaaaagcatcaactgatgaaaatgtcgtcagcatgtaatagaggaaacaagggggatgcggccgatggaaatggaacaaattgtgtttcaactcatcttacacggcgggaatggcagaagctccgcgatggaggccattacatgtgcaaagcaaggaaattttgatgaggcgaagcaaaaattgcaggaagcacaagacgcgttaaatgaggcgcatcacgcacaaacagagctgatccaaggagaaattagaggagaaaagaccgacatcagtctcttaatgatccatgcacaggatcatctcatgaacgcaatgaccgtcaaggaactcgcggcggaaatcatcgagctccatgaaaaaatgaagcaactcggaggtgtcaattcatgaaagatggaatcaaaattgtcacaataggcgggggatcgagctatacgcctgagcttgtcgaagggtttatcaaacgatatcatgaattgcctgtaaaggaattatggctagtggatattgaagcgggtcaggaaaagttaaacatcgtgggcgctctcgcgaaacgcatggttgaaaaagcgggtctgccgattgaggtacacctgacgcttgaccgccgggaagccctgaaggacgcagatttcgtgacgacacaatttcgtgtaggactgctggaagcacgggcaaaagatgagagaatcccgctcaaatacggcgtcatcggtcaggaaacgaacggaccaggcggtttatttaaaggacttcgaaccatcccagtcattctagatatcgtgaaggatatggaagaactttgtccagatgcatggcttgtgaactttacaaatccggcgggcatggtcacagaagctgtgctgcgctacacgaatctaaaaaaagtagtcggtctatgcaatgtacccattgggatgaaaatggggattgccaaggcgcttgatgtagatgttgagcgaatcgaggtacagtttgcgggcctcaatcacatggtctatgggttagacgtgtatttagacggggtcagcatcaaggatcaagtgctcgatgaattgggaaatccgaatagtcagtggtctatgaagaacattgaagcgaaaaactgggaaccttcttttgtaaaaggcttaggggtgatcccatgtccgtatcatcgctattactataaaacaaaagatatgctggaagaagagcaaaaagcagcccaagaaaaaggaacaagagcagaggttgtacagcaggttgagcaagaattatttgagctctataaaaatcctgatttatcgattaaaccaccgcagctcgaaaaaagaggcggggcatattacagtgatgcggcatgtaacttaatcagctccatctataatgataagcatgacatccaacctgtcaatacagtgaacagaggggcgattgccagcattccggctgaatcagcggttgaagtgaactgtatcattacgaaggacggaccaaaaccaattgcgacgggcgatctgcctgtagctgtgagagggctcgttcaacaaatcaaatcattcgagcgtgtggcagcagaagcggctgtaacaggagattacgagacggctcttgtggcgatgacgattaatccgcttgtcccatctgatgaaattgcaaagcaaattttagatgaaatgctcgaagcgcatcgtgaatatttaccgcaattcttcaaatcagtcaaagcgtaaaacaaagtggcccctttatggggtcgttttttatcattgccccatatgggaattcaagaaagaagtgtatgatagaaaaaacagcatgtatggcttcaaagaaaggactgtttgaatatggttgcaattggtttaatgctttacggctttatcgttcaaccactgatgagttacggcacagtggtcttgtttttgtatggcatcattgcttcatttattggtcttattcgtcatagacagtatgtgtggatttatgttctccgcctgctcgtttgttttaccattccagtgaccaacctgttgatgtatttcgcaacgattggtggagatgaaagagactttgatttccagcccatgccgcttgtttattatcttgtctttatcctagaaatcatcatcgtctttttaccagagatctttttactgatcgaaagaaagcggagcataaaaaggaaacagtggatatatgcaggggcgattgtgggggtatcggtcttgttttggtgcacgatttgatgggcggctgactggacatctgagtctatttcgcctttttgttgtgtagcctctttcgtctaacctttacaaaagtaatggaaagaacaaggataaaaatcccgagaaccttaaatagaaaccgggtgaggaacggtgaatcgtcgaaacctgtagctatgatcatcgatccgatgcaaatacctaagaacgctagtagataagtaaaaaacataccatcactccttatacatatgattaccattataaggtatattggaggggtaaataaacaaaaaaagaacccttcatgactgaaaggttcttttacatgcttaagtctgtttgacgaccgagtcgacttctactgtccagccgaagatatctggctgtgttcctttttgaataccagtaatggcttcgtacaatttcttcgatacttcacctgtttgaccatcttgaattacatatggctgatcgtgataaattaattccccgacaggagagatgacggccgccgttccagttccaaagatttcttcaagctcacctgattgatgtgcttcaattaactcatcaatcgaaattttacgctctgtcactggaataccccaatgttttaacagctcaagtacagagttacgggtgatgccttctaaaatgctgccgttcaattcaggcgtcacgatttctcctttgattttaaagaagatattcatactcccgacttcttcaatgtactttttctcgactccatcaagccaaagaacctgtgaaaagcctttggtttcagcgacttgctgtgccttgaggcttgaggcgtagtttccagctgttttggcatttcctgtcccgcccttaacggcacggacaaattcgttttcaactgcaattttgaccgggtggatgccttctttatagtaagatcccactggagataagataatcagcagcttatacgtgcttgacggcgcaacgcctaaatacggctcagtggaaataatgaatggacggatatacaaggaagtgccctctgcatcaggtacccaatccttatcaatgcgaatgagttcatttaagccctctaaaaccgtttctgtatcaatttgcgggatacacaggcggtcattggatctgtttaagcgttccatgttcttttccggacggaataagagaattttctgatcctcagaaacataagcttttaagccttcaaaaacagattgcccataatggtagaccatcgaagctgggtccattggaatggcctgataaggtataattctgggatcgtaccagccttgatcaatggaataatccatcacaaacatgtgatctgtgaagatttttccgaattcaagttgatcagattgaggttttggtttttttgttgaactaagttcaacgcggatgggttgttttggcatcgtaaatctccttgctgtttgattatttgaaaattctaataatatgaaataattatgattctattctataccttcacaaaatattagcaataggttttctggaattcagataagaaaaatctgttaaagcgctttccttctctctgccgtcagtctgcctcatgtcacctctttttaataaagaaataaaatccaaatgcattattaactgattaatctgacaatttaaaagcggatgattttcctgtaagatattctttcaaccatacaccttttgactagtacattgcaaggggcattctcatattttaatcctcttttttttaaccgataaaggaagaagagaagtgaaaggagcaaacaacaagatgaaacgagcgatactaggcattttacttattttattcatgaccgtgatcagcttcggctgtcaagcgatgacagaggaggctggcgctaagcaaagcacagcctattacgtggcgccaaacggaaacgacaaaaacccgggaacgaagcaaaaaccttttcgcacgctgaaaaaagcggcaagtatggcgaaagccggggcaaccatttacatgagaggcggcacatacaaagagaaattgattgtcctccattcaggtacaaagaaagcacccgttatctttcaagcttacggaaaagaaaaacctgtcattagcggggcttctcttaaaggaaatcaagcagatggcggtcttgtcacgatcgatcaaaaaagctacatcaccctcaaaggtctgacggtgggacatctcaagacgaataaggaagatgtgacaccagtcggtattttcatcaaaggaagcggcaaaggcgtcaaactgctcaacaaccgagtgtatgacattcagacgaaacacaaaaatgggaatgcacacggtattgcggtctatggaacaaaagctcctgcggccattgaagacattgaaatcaaaggaaacactgttgaaaaattaaagcttggcttcagtgaagcgcttgtgctaaatgggaacgtcaacaagttccgtgtgacacataacacggttcgccacacagataatataggcattgatttaattggttttgagaacgtagcaccttctaaaaagtacgatcaagttagaaatggtgtcgtatctaaaaacaaagtatatgagattacgagtgcagggaatccagcctatggcaaagacatctccgctggcggaatttatgttgatggcgggaaggacattgtgattgatcataacatcacacatcacaatgacctggggattgaagtcacaagtgaacataaaggaaaaatggcagatcgcattcgcatcgaacacaatcaagtgtatttgaaccgttatacaggtatttcaattggcggctatgataaaaagcgaggcggaacaacaaatacgacgatctcacataatattttgtacaaaaatgacacagccggcttagaaggcggtcaattgttgatgcaatatcaagccgtgaacaatcgaatcacgaataatattatgacagcgagtgcgtcgcattacttagtcgtgaatctttatggagtgaatcaaaagaataccttccagaagaacgtgtatgacgaccgaaaaggtgcaaagacatcacagtgggtatggcgcggaaaatggatggaaggctacaaaacgtatctcttgaaaagcggccaagataaaggatcagcacacctcaatccacaatttgtgaatgagaaaaaatatgactttcgcctgaagaaatcatcacctgctaagaaaatcatcggaagttaagcatgtctgaaccacaaacgcattgttttaaattttcaaaaaaatcattgacattgatgtgacatcacattaaagtaaagaagacattttaactaaaacaaaatttcataacggatctcttatcaagagaggcagagggactggccctatgacgcccggcaaccgtttctactatagaaattggtgctaattcctgcaaagctgttacagctttgacagataagagaggaagatttcccgatacatgtttcatgcaacggtgatcaagcctctcttccaggagaggctttttttcgtctctttttcaaatgaaagaacagtttactggcgttttcccactgttttacctagttttccgatgtggaaaataaaaacaacttgaggaggaacagcaatgaagcgtaagcattttacatcatgtcttatattattaatggtattgacgatcctattaacgggctgcggcactggatcaagtgcaggctcaaaggcaaatgcgaacgaaaaggtctcctttgacaatgtaccgaagcgatttgcaaagggacagggagcaaaaattaaagtcatccgtaaaatcggaggagatgatcatacagcgcagtttttagctgggacgaaggcagaaggtgaagcgcttggctttacggtagatgtctacaccgcaaatggagatacagcgaaattccatgatgcgatctctcaggcgctggaagaaaattatgatggctttatcatctctcatggggacgacgaggcgaccgtcgctgacgtgaaaaagattacagcgaagggcattccagtcgtagcgtttgattcgaatcctaagctgaaggacatcaaaggggtcacagtgacgtctcaagatgacgaacaattagcgaaaaaatcattagacgcactcgtatctgattttaaaggaaaagcaaatattgcatacctctgggtagatgggttcccgccaatggtgagacgaaacaaggtctatcaagaaacgctcaaccaacacaaagggatcaaggaacttgaccgctttggcattgcttcctctgatacgtctgttcaaacgcaaaatgcagtagcagccatgctgaataaatatccaaagggtaaacttgacgctatttttgccacgtgggatgcctttgccattggcgcagcaagagcgctaaaggaagcaggaagaacagaggtgaagatttacgggattgatgtgtcaaatgctgatcttcaagagatgacagcgaaagaaagtccatggaagtacacagcagcggttgatccgaagctcatcggcgctgttgacgtgagaattcttgcgaagaaaatagcgggcgagacaacaccatcttcctatgaccttgaggcctctctcatctcgcagaatcagcttcaacaagcaggaaaagccatcaatatggtcaatcttgcagacgaagtgaagggattcggctcatcgactgcttttgaagaagattggatgaagaccttgaagaagcattatacaaaataaacgacgtgcactctcttccatagagagtgtttcgtttttcagatgatgatcatgagaaggaggacacctatgacttcgccgcttgtttgtatgaaacatatttcgattgaattcccaggagtaaaagcgttagatcaagtgaattttacattaaaaaaagggacggttcatgcgctgattggagcgaatggtgctgggaagtccacgttaatgaaagttctttctggcgctcattcgcactatgaaggaagcatccatatcaatggtcaggcggcatccattcaaaccccaaagaatgcggcctcatatggtgtgcagacggtccatcaagaagtggatacggcgctagttccctacttaagtgttggtgagaatatgatgatgcatcagattgagaaaaaaacatttgtcggctggaaagagctgcaccgtaaggcagctcaactattaaaagaaatggacatcgacatctccacaaaacgccttgtgagtgatctgacccttgcagaaaaacagatggtgctcattgccaaggccgtttcgattaaatgcagcattttaatcttagatgaaccaacggcccctcttagtcatacagaaacaagcaagttattctcaatgattgatcggctgaaacagaatggaacgggcattgtgtttatctcccatcgcatgcctgaaattttcaccatctgtgatgaactgacagtgatgcgaaatggaaccgatgtcgcaaaacacctcgttcaagatacaaatccgcagcagattattgaagaaatgctaggtgcgccattagaggagcaattcccgctccgtacacctttgaaggatgcacctattgtgcttgaagtgaagcagctaaacgaccagcataaattacgcaacattcatcttcacgtgaaaaagggagaaattctcggaattgcaggccttgtcggtgctggaaaaacggaattgtgtaaagcccttttcggcgcctcagaaaaaaagacgggaactgtgcagcttcatggtcaaaccgttcgcatcacatcgcctcatcaagccgtgagagctggaatggcccttgtgccggaagaacgtagaaaggaaggggttctaacagaagagagcgtgggatggaacttaacggctgcaagtcttcgttcattctcaagagtgttcagcttcttacatcgttcgaaggaaaagcgggaagcagacgtaatcgtcaaacggcttggtgtcaaaaccccatctcttgaagcaaaggtgaagcatctatccggtggaaatcaacagaagatttccataggaaaatggctgctggctgaagcggatatctatctctttgatgaaccaacaaaaggcgttgacgttggagcgaaaaaagatattttcaccctgattgcagagcttgccgaccgcgggaaatctgtgatttatgcgtcaagtgagctgtcggagattgcaggtatcgcagaccgagtctacgtgctgtatgatggcagcattgcccgggaaatgactgcgccaacgactgaggaagagcttttatatcattcaacaggaggacaatcatgagtgaacgacaaattccagcccctgtgcagcaaatgaaaaaacagcggccatcctttcatctatttgatttcttttatcgatatggcacgatcttaaccattgtcgtattgattgtggtatttgcggcagcgaatccagcgtttttgcaatcagggaatatcatcaatatattacggtctatctccattgtgaccattattgcggtgggccttaccatctcattggcagtaaacggctttgatttatcagtcggatcagtcgcaacgttatcgaatgcaattgtgatttctatgttcgtgtggttttcgcaaaacccgctgattgcgatcctctctgcgctagcggctgcccttattgttggtttactcaatgccttgatgattgtcaaaatgaaaattccagatatgctcatgacattagctatgatgtttatcattcaaggactggctcaaacgtatacgaaaggggcgaccatttctgaaaacatggtgctgcctgacggtacattctcaacgggcacaatccccgcctttttcagcaaaatcggccaggtgccatatatcattctcttaatggcagccattgtgctatttgcacatgttttcatgacctacacaaagcacggccgatttatgtacattattggagggaataaggaagcggctcgattgtccggtattcatgtaaacaaatataaaatcgcagcatatctgctctcggctttatttgcagcaatcggtggtattgtgctggcatcaagggtgatgacagcggaaataaatgctggcgcaccttatttaatggatggcgtagcggcagcttttatcggtttttccgtcatgggagcaggaaagccaaatgcatttggtacgtttattggggctgtgctcatcggtattttgcaaaatggacttgtgatgatgtctgtcccttattacgcgatggatattgtgaaaggctctgtactcgcgcttgcgctggcgttaacgtattacaaacagcgaggctgacgacgtattttttaaaaccttttgagtcttttctccgtctagtaaacggaaagcggtgcagccgccgtttcccaaaaggagatgacaaaaagaaatgaatatgtcagcaactcatgtagaagatttgaaaaacgtcatggaagactggaaaaatgaattattagtatataaatttgcattagatgaaatggatacaaagttttcaattatcagccaggaatataatttaatccatggacacaatccaatagagcatacaaaatcacgaatcaaatcctttgaaagcattgtaaataaattagcaagaaaaggatgcgacatcacaacacaatgtgccaaggagtatatccatgatatcgcaggtgtccgtatcatctgctcttttattcaagatatctataatattatggatgtattgaggcaaagagaggatctaaaaatccttgaagtgaaggattacattcaacatccaaaaccaaatggctacagaagtcttcatttaattgtggaaatccctgtgtacttaacgaatcgtgtggagcatgtgaaggttgagattcaggtgcggaccatagcgatggatttttgggcgagccttgaacataaaatctattataaactgcaaaacgatgtccctcatcagctgaccgatgaattgaaggaagcggcagatatcgcccattacttagatgaaaaaatgcaaaatattaaacgagaaattgattagcgcatagaaaagagcagctgttatattcacagctgctctttttcatttttaaggattggtgccgcggtctctcttttgaatgatatcttgagattgtgcagattggctgtctttttggatagaagcgccaatggaaacacctgttatcaagagtgtcaaaatcgcagttgtgataaaccattttttcatcatacatcactccatatttttaacaagtttttaaggacaacgccttgttccagaaataagtggattcttcatgaagtccaagatccgttaagtaagcagctgcatcctgacagatggcttcaagatcgacaaggaaattcatagattctaattgatcacaataagatttgatttgctccatcatgttgtctggctgaagcataagtgtttctaaaatggataatttaagtgaaatgtttcgttgttttaaattttctgctttttgtagtgaaagctgtacataatagtggaacaaaccaggctttttcagcttgaacagtgcttttgtataggcatacatggcaagtaagtagccgcctggagaagacgtttcaaatgtctcgatcaataaagctttttctaggagcggcacagcttcactgtattcatttctaagacttttaataaaagctgcattgcaatacgcgtgaccaagtaaatctgggtcttccatttgttctagtgaatgaattacttcttcaaataatgactctgcctcatcatatttcgattgatcagcataattcaaagcgagcatcatttgacagctgattgattttttcacataacatggatctgcgtcataaatagatgaagccatctttaagtggtgtatggagagaagcgtggaccttatattatagtaaagacaccctgttttataatgaaattctgctttttcaatgtcatcgtgcacgagatctaatttatcctcggccaattttaaaaggtgaaatgccgtatcctgattgcctctgcgcatttcatacatccctttaaagaaatagaaatagtaactgagcatgtcatctgtacggatcgcattttcatcaacaaaaagactatgatccaacgaagctgtatcttcgatgagatccttaaaacggtactctagcaattgatagtaaagtaagacgtcttgattctcttccattcgatcaaacgcttgaagaatctcttcttttagctggatcgcaccttgtatttctctttttttcatcatgacataccagtcatttaacatattcgctacatcaacggacgacaaaacacctgtttcggccaatttatatcctcctttcttcatctatccatctagttcgatgtccattcatctgaattcactttccatattcagtatcttcttatattttaagcgctctcttgcaatttgtaaaacatgttttttgatgtaaattcaaccagttgtgaaagaaatagggatcatccatctttttgtatgcgtttacatatttttaggtaaaaagagggttttggaaaaaatatattacgatatcaatagagagaagaaggtaattcaagagtctgttttcgtatgttagaaaaaacggagattttcaaggtgatgtctcgttttttcgtaagattatctcacatcatgattgtgaatcactcttcttttagaataaaatgagttattcgcaaaaaagtaaaatttaaagagactattgatctagtattgtatggatctttggtattgataaaaaatatcacacgctatagatttagcgtggtatagtattattggtattgcgaatatttagacaaaactgacaatagggggtcgtgttttatgaaaaaatcgatgttactgatcatgggactcattgttgtgctcgtcatggcagcctgtggatcaaaatcggacagcggttcgggagaaggcaaaggcacatataaaatagggatagatacaacatatccgccgtttgaatttgaaaagggcggtaaatatgaaggaatagacgttgatctgattaacgcaatcgcgaaagaccaagacttcaaagtgaaacttgaagctatggacttctcaggcattattccagcaatgcaggcaggccagcttgatgtaggaatgggcgggatgagtattacagatgagcgtaagaagaaggtagatttctcagatccatacttcgacgctggactgacagttgttgtgaaaaaggacagcagcatcaaatcaattgatgatttaaaggggaaaaagctagctgttaaaaatgggacgacaggtgcaaaatttgcatcagataacgcagataaatatgggtatgaagtggttcaatttaatgacagcccatcgatgttccaagaagtttcaaacggaaatgcagatgccttaatagaggattatcctgtcattacgtatgcaatcgcacaacaagatttaaaattgaaaacagttggagaccgattgaatggagaccagtatggtatttctgtgatgaaggggaaaaaccaagacctattgaaaaagatcaataaaggtctagagaacctaaagaaaaacggtgaatatgacaaaattattgataaatatttgaagtcataacacaagcgaggcgcgctccgagcgcgctttctttatgtggcaccgtatgtgaattagggagggagaaacatggacacgattattaatgcatttccatatttaatggatggtttgcaaaccactttatatatctttgttgttgccatcattttaggatttatcatcggtttgattgtggcattattccgtctgtcaccttttaaaatcttaaacttcatcgcacttgtctttgtcaatgccattcgaggcacaccatttatcgtacagctattcttcatttactttggtttgaatacacttgaattcatatcgcttgatcgagtgccggcagggattattacagtagcgattaatgcaggggcttatttctcagaaattattcgtgcagggattcagtccattgataaaggacaaacagaagctgcgcgctctttaggctttacagggggacaaaacatgcgctttatcgtccttccgcaggcattccgccgcatgcttccagcgattacaaaccaagccatcatcagcttgaaggacacgtctctcttatcgattatcggaatcgccgatattatgcagcggggacaagtacaggcatcggcaacatttgatcctttgaatgtctggctcattgtcggtatcatttatttcgtgatcatttatttactttctctactggctagctatgcagaaaggagatttgatatcaaatgagtatgattacggtgaaaaatttaaagaaatcctttggcgatcacgaagtgttaaaggacattaatgcagtcatcgaggaaaaggaagtagtgtgtgtgattggtccttctggatcaggcaaaagcacgtttctaagatgtctcaataaattagaagatattacggctggcgaagtcgttgtccacggacatacgattacagatccaaaggtgaatatcaataaagtacgacaagaagtggggatggtgtttcagcactttaatttatttcctcataaaaccgttttagaaaacatcacgatcgcaccgatgaaggtaaaaggcgccgacaagaaggcggcagtcgataaagcaatagacctgcttgaaaaggtcggcttaaaagacaaagccaaaagctaccctaaccaattatctggtggacaaaaacagcgtgtcgccattgcaagagccttggcaatggacccgaaagtgttattattcgatgaaccgacctctgctcttgatcctgaagtcgtcggggatgtattagcagttatgaaacaattagccgtcgaaggcatgacaatgattgtggtcacacatgaaatgggctttgcgagagaggtaggagaccgcgtgctctttatggatggcggatatattgtcgaagaagacaaaccggaggctctctttggaaacccgcagcatgagcggacaaaatcatttcttagtaaggtgttataaaaaaagagtaagggcatatggatgctcttactctttttcttttatggagcctaagaaatatcgcagtttatatgatgataaaggtaactggccccatttcctaggaaatattagcgctggaagaattcgatccattcttggtctgggcctctgaaaaagaagtagcagtatccatttggtaacgtcgtaatttcttcatcaattaattcaatttgcagcttttgaatacgattgaattcagcatgaatattgtctgttgtaaaggcaaggtgatggacctttccttcagatggcaggtcgctgctgtacccttggatgagctcaatttccgtttctgtttcatctttaaaaccgagaaatgcaagctcaatgactccgtttgtatgagtgatgcgatcctttaatttcatgcccacgaccttttcataaaaatcaatggactgatcaatatttgtgaccataatacctgtatgatctaatcgtaatgtcgtcaaaaaaagagcctcctctatggtgtgttgatatttttctcctcatcttatcataataggagtaacgtatacattcatatgataggatagagagagtcaatttaggataaggatgacacaaatgaaaaaaatctcattaaaacaaacatttgcagaacaagtgaaaaagggatatccgctcatttccaaagatgctgtatctcatgtaagcggtgtgaaagaaggcgagctgattgaatgggtggatgagcgaggcgcctttttaggaaaaggatattatggtgtacaaaataaaggaatcggctgggtactcacatttgatgccaacgaaaaaatagaccaagccttttttgtctccaagcttgagcaggcagcgaaaagcagaacgcatttatttcgtgatgcgcagacgactgctttccgtgtgttcaacggagagggagatggcattggcggcttcacgattgatcattatgacggtttctatctcatccaatggtatagcgaaggagtttatacattcaaggcggaagtattggctgcacttgagcacgtatatccagactataaaggcatttatgaaaagaaacgatttgatacgtctggacagtatatagaagatgatgattttgtgaagggagagaaaggtgaatttcctctcatcgtgaaagaaaatggcatgaacgtagcggtttacttaaatgatggtgcgatgacaggcatttttcttgatcaacgtcatgtgagaaaagcgattcgagatcgttatgcaaaaggaaagaccgtgcttaatacattttcttacacaggcgctttctccgtggcagcagcgcttggcggagcgagccggacgacaagtgtagatgtcgcaaaccgcagtttgaaaaaaacatctgaacagtttgaagtcaacgatatagatgtggacgggcaggatatgaaagtcatggatgtctttaaatattttccgtttgctgcgaaaaaaggatggacttatgatcttgtcatcttagacccgccatcctttgcacgcacgaaaaagcacacattcagtgcggcgaaggattataagaagctattaaaagaagccatccaaatcacagctgagaacggcgtcattgtggcatcaacgaatagcagtgcatttggtatgaagaaattcaaaggatttattgcgcaggcctttaaagaatcagggcaaacctatcgtatccttgaagaatatacacttcctgaggatttccgtacaacgaagaattatcctgaaggaaattatttaaaggttgtctttatccaagcataagaaaaagccattttccgataaaggaaatggcttttttataaggcaaacgacatgaggagaggcgctgcacataatgtaataatagctgaaagaatcatcgacacacttgagatcgtccctgagacggagctcatttcaaatgccttcgatgttcctgccccgtgtgcacctgttccaagcaggacgcccatggcaatgtcattatcaatacggaaataacgaatgaccattggaccgatgattgacccaaacagtgcggttaaaatgacgaatacagccgtaacggacggcatgccgccaatcatttctgacacactcatcgccaccggtgttgtgaccgaccttgggacaagactttcaataaggcctgtatccaaatgaaacaacttggcgataaatgctgttgataggatcgcaatgacagaaccacaagccacattcaaaataatttccactgcatgcttcttcagaatgtgaaaatacttatataaaggaatggcaaaagcaacagtcgcaggctgaagcatattcgtgagccatttaccgccttgattgtatgcatcgtaaggaatgttgacgattaatagcaagacgacaaggacaagcggcgtcacaagtaatggggagacatagaccttcggatgccgtttatacaccgcttttgatccgagatataaaagaaccgttaagatcagaaatagtgcgccaactaacatagcttttttcgctcctttcttttcgcaatcatttgcgtcatgataccagtcgagagcatgacgacaaaggtactaagtaagacgacaaggacaatacttgtgccagattgagaaagcaatgttccataatcaatgacaccaactgctgacgggataaagaatagcagcagttctccaagcagccatacggcgccaagttcaatccattttaattgaataattttaaaatgaagtaataagaaaatgaccagaatgcctaaaatcgtgcccggaattcttaaatgcaaaaaggccgcgagcacattcatcaatttcgcaaaaacaaacaaagccataatctgaaggacagcaatcagcggcgttttgagcaatttcactttctgttcactcctttttctatataaattgttcactgtttcacaaaaacatgacaacgttccaattgattagcttactttaaagtgtacagcacgttcagttataggtaaaatacatatatcgaatagttagtattccttttgtctataggaagggtgagtcatgtggacattagacatttaacatatttcttagaagtggcgaggttaaaaagcttcacaaaagcatcacaatctctttatgtgtcgcagcctaccatttccaagatggtcaaaaatctcgaggatgagctgggggtgcagttgttttatcgaaatggccggcaggttgaaatgacagatgctggacaaacgatgtatacacaggcgagtgaaatcacacaatcatttcagaatttaacgagcgagctaaatgatttaatgaatgtcaaaaaaggacatattcgcatcgggctgccgccgatgattggatcgagttttttcccgaatgtcatgggagaattccgccagcagtatccagatgtcacatttcaattggtggagcacggctctattaaagtagaggaaggggtcgaagatggttcgttagatattggtgtcattgttctgcctgcaaatgataaaatttttcatacgtacaccattattaaagaagacatgaagctcgtgacgcatccatcacatccgatggcgggtcgtgataaggttgatttagctgatttaaaggaagagtcttttattttctttcgagaagattttgttctgcatagccggatattgaatgaatgtatgaatgcgggattccggcccaatgtcatttatgaaacgtctcaatgggatttcattagtgagatggtagccgagaacttgggaattggtcttctgcctgagcggatctgccgtgatcttgatcctgaaaaggtgaaagtcatttccttaaacacgtcgatcccgtggcatttaggagtcatttggcgaaaggatcgctatttgtcgtttgcggcaagagaatggttaaagcatactaaatcctatgtgtggggagcagagtaaaagggaggacgatacggatgaaaacaagctgcgtgtctcatttattggagagggttcgagcggaaaatccactcgttcataatatcaccaatcaagtcgtgacgaattttacagcgaatggtctgcttgctttaggcgcttcgccagtcatggcaaatgccaaagaagaagtggctgaaatggcgcagttggcggatgcacttgtgctcaatatcggcacattgacaaaggacacggtggaggccatggttctggctggacaagctgccaatgaaaatggtgtacctgttctattagatcctgtcggcgtcggtgcgacaacgtttcgaacgaaagcggcaaaacagctgttagagcaagtgaacatgaccgttgtcagaggaaatgctgcagaaatggctcatttacttggagtggatggctgggagtcaaaaggcgttgacgcgaaagcagcgaacggagatgtattggcactagccaaacaagcggcaaggacacttcagaccgttgtggtgatcacaggaaaagtcgatgtggtgtcagatggagaggacgtgttgtctattcataatggacatgaatggctcaccaaggtgacgggaaccggctgtttactgacgtctgtcatcggggcattttgtgcagtgggtgaacggcctattcatgcgtcagcagctgcattactgttttatggtgtcgcagctgaaagggcagctcagtacacaaaggataaaggaccaggaacttttcaaatggaatttttaaatgcactctcacaaacaaatggcgatgatgtgttgacattggggagaatagggggaatttcacatgacaaaggctgatcaacagcaaatcaaacagcaattatcggtttattttattatgggaacagcgaatacaagcagaccgccgcttgatgtcgtaaaagaagccattcaaggcggaatcaccatgtttcaatttcgagaaaagggcgagggagccttgcaaggaggagagaagaaacaattggctcgtcaacttcaagtgctttgccaagaagcaaatgttccttttattgtgaatgatgatgtacagctagcgatggatcttgatgcagacggcgttcatgttggacaggaagacacaaatgcagaagacgtcagacaaaaaatcgggaataaaatattaggtgtgtctacgcataaccttgatgaagtgaaacaagccattaaggacggcgcagattatgtcggcatgggcccagtttatccaacagaaacgaaaaaggatacacgcagtgtccaaggtgtgtctttgatcactgaagtacgtcgtcatggtcttcatattccaattgttggcatcgggggtatcacatacgacaatgctgcaccagtcatccaagcaggggcagatggtattagcatcattagcgccattagccagagcgctgatccaaaaaaagcagcagaaaaattgaaagcacttgttgcattagaaaaagcatctctttaacctgtaggagacatggattgactcaattcatgtcttttctgatttcagggaaaatagacaggtgagaaacaattgtgtacaattaaattgttcgattattttcgaaatgacaggtaaataaaggagaatgaacaatggaagtgctcgatacgtattttcgccgctacgatgaagcaggaaaaggacaggagcaaatggatgaattgctagcattgttttctgacgatgtcatgattgtcttaaatggtgccgagaagcctggcatccaagcgtttacacagtttttaaacacgtttttccacgtgcatgaagacatcaagcatatgtgggatggatggaaaaaaagagaagacggaaaatatgaaacgaactgggctgtttgcgggaaactttcggatggccgtgtctatacagcagaaggaattgacattgcagaactggacgacaaaggaaagatcgtttatttagaaaacgttccgaaaaatccagagttatttcagcgctattaaaaagccggctcgctgccggcttttccttatgaatcagtatccatatgcatgcctgtatgtgcctttacttgaatttccgtaaaggtgtcttcatctgctttttcagaggagaatatcgtgcctaagtaagcggcaaggaatccgagtgggatcgagataattccagggttcgacagcgggatgagcggatctcctgtaaagatggctgttcccaatgggtcccagacgcttggactgagcgagacgatgatcagtgcgctcagcagtcctactaagctccctgcaatggcacccgtagaattaaatcgtttccaaaagacagtgaagataatcaatggtaaatttgcacttgctgccacggcgaaggcaagtgacacaagaaaagcgacgtttaaggattgggcaaataatgcaagaatgatggaaagaatggccacgcctatggaagcaaagcgtgccgccttcacctgttcccgttcactcgctttccctttgcggatgatctgactataaaagtcatgggcaaaggcagacgctgcggataagacgagaccagttaccactgccaaaatggtcgcaaaggcaatagcggaaacaaaggcaaataataaatcacccccaagggcttgggcgagcagaggagcggccatatttcctgctgcatctgctgctgtgatcgcttctgttccaacaaaggcagcagcaccgaagccaaggaaaaccgtcattaaataaaaaataccgatgatccacgtagcggatagaacagatttacgcgcagaaatggcatcctttaccgtataaaaccggatcaaaatgtgcggtaaacctgctgtcccaagcactaaagcaaggttcaaagacagtgtctctaaaggcacatcatatttatttcccgggtgaagaaatgccccaccgagcggggtcgctgttttcatctcctcaaacatcttcagcagactaaaatcaaactttgcaaatacaagcagtgaaataatcagggtcccaagcatgagaagcacagcctttgtgatctgtacccagctggtagcgatcatgccgccaaacacgacataaatggtcatcaagacacctacgaccagcacagcaatccagtaatcaatgccaagaagcagtttgattaatgcacctgccccaacaagctgtgcaatcatataaaaagtagagactgtgattgtgttaaacgcggcaacccctcgaatggcaggacgcttaaatcgtgcagcaatcatatcggccatcgtatatttccctagatttcgaagcggttcggccacaacgtaaagaacgacaagatacgccactagaaagccaatgctatagaaaaagccgtcaaatccatttaacgcgatcattccagcgatccctaaaaatgatgcggcagacatatagtccccggcgatggcaaggccgttctgaaacccagtcaaacctccgcctgccgtgtaaaaatcgctcgcattgctcgtttttttcgcagcaaaatatgtgatgaccaatgtgagccctacgatcgctatgaataaaataaaagcggtcatgctcattcgtcatcacctcttgattcagtttttaaagcgcttacatatttgtcaaactgagctgcttttctcgcataaagtccacataatacccaagtcatgacaaattgtgtgagggcgaataaccaagcccatgagatcgcgccaattgccggcgtgttcaaaaaggtgaagtaggatgtagcaaccggaagtgaaaagtaaaagagaaaaaagaaaatcgtcatcggtacgataaatctgcgtttttcctcgagaagttttcgaaaatcctctgaagcggcaaccttcttataatgaacttttttgtctgccattgtttcctcctttgtacgaattagggacaaggtactccaatgcatatgagacgatctggttgtttatgacagtatatcataaaaaaggcacccgaaaagggtgctttctaccgataatttgcaagaaatgtttgtctcgctttttcatatgcttccgcatcaaaatgatctccgcatttgtggatgcaccaaggctcttcttgtttcgcaatgccaacctcatagccctgctggacgaattcaaaggactgcgaaatatcataaaaatgaaagccatcaaagaggtcctcacgccacttcacatcatattgcgtcgccatgaaaagaccatcaatcgccgaagcgttcatataatcttgcgcttctgcctgttgacgaccactttcaaacgaaagcagctgataggtgtcgtgacgatattcaatgactttccccctgcaatcagaactctcccaccaaatcccattgtcaggcacgctttctgcacctatgaccccaaccatcccaagtgatggatgctgtaaaaaaagcgggatcagctcaagcagcatatgctgtttgacaatcaaggtatcttgatgaagataaattttaaactgagctggatgggtgatcgcttcattataagcagaggtcatactggatgcatgtctaatcggcaaaacctccacatgatatccatggggagcaggaagtgaagcgagctgccgaaagcaagtctgaaacatcgattcatcatttacacataaaacaaacaggatggtggggttactcatgaaactgaaccgcctcaaccacatactgataggcggtagcggcctcgtgaaaatctgaacgaatgccatgcttcatgagtaattcatgtaaatcactcatcacgcttgcataggaaggatgctttacgcgaatggtttcgagttcgcgaatacgaaagcctgctgaatgaaagagtgcatgaatttcgtgaagggtgaagaaacgtaaatgtgtttgatccattaatcctgcatctgtataagtgaatctgccggctagtaattctaaaactgttgatatgtgaccgatattcggaatggatgacaggatgactccttcttttttaaggaagggtttgaccttctttaaaacggcccacggatccaataaatgttcaaggacatctccgaaaatgatgcagtcaaagtgttcatgttcgtaagggagagtcatctgttcaatatttccgcatagcacatgatctagctcttgctcagcctcttttgctgcatcctcaaacgattcaattccataaatggtccggcccttttgtttcaggacttttccaagtttgcctgtgccgcatccgatatccaataaagacgtccattcctcacgaatacggctgacaatgaccgggttcacgccatgataatactgatcctttttttggtgataataggaaagggaatctgaactcacgctctacccacctttctgctttctcattgttttcatgcttaatatatgggtggggagcttggttttataacgtgagaatgacaattttcatgaatagcggctataaagggatcatataaagaacgggaaacggactgtcctcctaatatagaaagacagaaccccatgagtggaagggattggtatgaaggggtgttcaattactgtagcgtatcgtcatgaaaggattttcaaaaggtcaattgacaagtcagaacttttagccaaagcagtctgaaagacaaaggataacggcgttgatttacggtttgtttatcatcttctgatcaccgttggatgttaaaaaagcttgtatttcttcgatgcctagtccaatttttttcgcttcctgaatcaaataaacccactcttcgtcaactcttcttttcacttgcgtatccataatatcctccagttcaataagacatattcatctgcaaccaatgacttgaacaaaccgtctagtaactgtacgtgtggatgaaaacagcgcaaaatagattttgtcgaaaaatgatgacatttaacctattttgtaaaatctatcacctaccacgttcctaaaaaaatgactaaaaaacccataaatattgatttcttacttctaataataaacaattgtaaagtcagttaaaagattataaattaaaataatgaaaaagacctaaaacgtttggcttatataaaccaattaggttgacatttgccatcaagtagaacaaatttcatctgtgcaggacgtacatattgttcgtttgggaagttcttctcaagatggtattctaaaagaaacagaaaccaccaagaaggaatgaagaaagacatgtatagcctttttcaaaagtatcaagaagttgtcatgtatcttgtgatgggtgtgtgtacaaccattgtcaacatagtcagcttctacttattcgttgagatgttttccatggattataaaacagctacagttgtttcatgggtatttgctgttctctttgcttatatcaccaataagaagtatgtcttcaagcaaaaggctcgtgatacgaaaagccttatgcgtgagctttcttcattttttagtgttcgtctcatgtctctaggtgtagatctggggctgatgattttatttgtgagccaaatggcgctcaatgaaaccgtcgcaaaaattcttgtcaactttgtgattgtggtcgtgaattatgtcgccagtaaatggttcgtcttcaagaaaacaaaagaagatgcgatttaacacatgaaaaaagataggtgatgtgaaatgagcagcaggccagacgaattatatgatgtcatatatcagcaaacagaaaagcagcatgaacaagtgctgaggctagtcaaagaaatgaccgcacatccagaagcgttttcggaacaagaaaaggaaaagatcaaccgaatggacattgcgcttcaaacggcaacggacattttagaaaacttaatgacacctgacacgcaaatgaccattgttttaagacaagggagaattcatgttgacctgacgaaagcgtaaaagaagcagccaattgtgaaagcggctgctttttattatgcatcgcttgtttcccgcagttgctttggagacatgccgattttctttcgaaagactttattcaagtaattcgcatttcggtagccgcactgtatggcgatttcttcaatcgagtattttgttgttttcagtaacgtttccgccttttctaaccggatattggttagatagtgaataggtgtgaagccagtggcctttttgaattccctcgtaaaatgacttttggataaacgtgccgcagctgccatatcgtccgggccaatttcctcgtgaaaatgatggctggcaaacaaggcagcttgaacgatgggctcgggccatttctccatttgtccctcaagctttggcaaatatgaatatagttccatgacaaattgataagcaaggctagacccctcaaatggattggtaatccgtctttcactggcttcatcataaatgttcttgagcaggcggatcggtctggaatttggatgaaaacgcatgacctgctttccttggtcaataaattggtcaaagcaaagatcgcaggcttccccgtaaagcgttaaataaaggaattcccaatgctcactgtcctctggaaaataatattgataggcacttgggcttttcacgagaaaggcctgacccggcaacactttgaaacgtttctctccgatttcaatcatgccatgtccagacagtgtgagctgaaagatgcacttgccttgatctttccgctccacgccattccagctatataacgaagatgattgtacttcccagccaacagaccatatttgcgccggcaatgtcacatcagaatggtgaaaacgaaatgcaaatgcttccttcttcaaattggaaaccctccttcacagcaaaaaacaacctttttctatttagaatcatgttacacctcatatcacatcgtaccattcacagcaaaaaaagggtattttttaacggtttttttaccattgaactgatgctgctgggacaactaaaataaaagtatcagaagagaaaaggggaatggatatgatcgagacgttacgcgcggcatttcaccagcaatttggagatggagaagaacttcgctatttttttgccccaggaagagtgaacttgattggtgaacatacagattacaatggaggccatgtgtttccatgcgcacttactctcggaacgtatgctgcttgtgcgaagcgttcagatggccgcgtgagaatgtattccttgaactttgatagcgatggtgtgaaagaattcaacctttatgaaatcgcttacgtggaatcggacggctgggcgaattatccgaagggtgtgttcaatcagtttatagaagcagggatgaagatagaagaaggctttgacattgtgtacagcggcaatattccaaatggcgcaggtctgtcttcctctgcctccattgagcttgtcaccgctgttctcatcaacgaatggcattcattcagcgtttcaaatgcccgtcttgccctcctctcacagcgtgcagaaaatgaatttattggcgtcaattgcgggatcatggatcagttttcgatttcccttggaaaagaagatcacgccattttgctcaattgtgacacccttgcctttgaatacagtccttttcggcaagagggactggcgcttgtcatcgccaatacaaataaaaagcggacactggctgattccaaatacaatgagcgtcgggcagagtgtcaatcagctttaaatgatcttcggaaaaaaatcgacatcacccacttatgtgagctcactgcggatgaatttgcagcacatgcccacttgattgaagatgacatatgccgcaaacgggcaagacatgtcgtgacggaaaacgagcggacgatgaaagcagtaaattttctgaaagatgataaaatggaagaactaggtgggctcatgaaggcttctcatctttctttaaagaatgattatgaagtaacaggacttgaactagatgcactggctgaagcagcttggcggcacccggggacgattggctcccgtatgacaggtgcaggctttggcggatgcacgatcagcattgtgaaagaagaactgctgggttcatttatagaagaaactggtgcgacatatcaagagaaaacaggcattcaagcctctttttacacagctggaattggaggcggcgcaagagaactcacaaaggaggaagtgtgatgacaattttagtttgtggaggagcagggtacataggcagtcatgcggtggcggctcttctagcgaaaggcgaacgagtagtggtagtggataatttgcagacaggccacaaagaagctgttttggaaggagctgtcttagaagagggagatttacgggatcacgtctttttaagacaggttttcaaaacgcatcaaatagaagcggtcatgcactttgcggcagattcacttgtcggggagagtgtgacagacccgcttaagtactatgacaacaacgtcggcggagcaaccgctttactacaaataatgaatgaatttgatgtgaaacacatcgtcttttcttcaactgctgctgcatacggtgaacctaagcgcgtgccgatcgttgaaacggatgaaacgaacccaacgaatccttatggagaaacaaaattagcgattgaaaaaatgctgaagtggtctgagcaagcgtatggaatagaatacgtggtgcttcggtactttaatgtagctggtgcccatacagaaggacttgtcggagaggatcatcagcctgaaacacatctcattccaattattctgcaagttgctttaggaaaacgggatcagatcaagatttacggtgatgattatgagacagaggacggcacgtgtattagagattacattcatgtgatggacttagtagaggcacacatcttagccgttgatcggctgcgtgcaggaaaaggtagtgctacctacaacttagggaatggaacaggtttctccgtgaagcaggtcgtagaagctgtcagaaaagtcacggggcatgccatcccggcacaagtggcaaaaagacgcgcgggagatccagcaaagctgattgcttcttctgaaaaagcgctgcaagaattgggatggacacctcaatatgctgaccttcacacgatcattcagagcgcgtgggattggtttcagaagcatccagatggctaccaaagtgaataaagcgtaacaggcaggcaagagaggggacagagggaatggcgattgatatttttgaaaaattggaacagctgattcaatacgggatcaataaagagctgatgacatcactagatatcgattatacgagaaatcggctgcttgaggtgctcgggctcgatgacgctgaagcaagaacagtctcaggagaaggagaccttgaagacattttaatgccgatgctggattgggcagtagaaacaggccttattcctgaggggacggatacgtatcgtgatttactagatgcgaaaatcatgggctgcttggtggcacctccaagtgtcatctatgcgaagtttgaagaaaaacgccaacatgagggaccagaggcagctacaagctggttctatgcgatgcagcagcatgcccactatattcatacaggcaggatcgccaaaaatgtacagtggtttacaccaacagacgatggtgtgctggagatcaccattaatctatcaaaaccggaaaaggaccccaaagccatcgctgaagctaagaagctcagtcaaaagcaataccctctttgtctcctttgtaaagaaaacgttggcttcgaggggcggatcaaccatccagcgagacagaatcaccggattattcctgtgacactctcaggtgaatcgtggtttctgcaattttcaccttatgtgtattacaacgagcactgcatagtgttcaaaggtaaacatgagccaatgagcatcaccaaaaaaacctttgaacgactgctttccttcatatctatatacccgcactatttcatcgggtcgaacgccgaccttccgattgtcggaggcagtatattaagtcatgaccattttcagggcggtgcacatgaatttccgatggcgaaagcagagatggaagaagtcttttctctcaaagcctttccggatgtgcgagctggcattgtgaaatggccgatgtctgtgatccgccttcgaagcagcgagcggcagtcgctcgcggacgcagcagactttatcttacatgagtggaaattgtattcagatgaagaggtggggctgatcgctcatacaggagagactccgcacaataccattacacctattgcgcgacgccacggggatgactatgaattagatttagtgctgcgtaataaccgtacagacaagcggcacccagacggcattttccatccgcacgaagaagtccaccatattaaaaaagagaatatcggattaattgaagtcatgggccttgctgtccttcctggcagattagcagaggagttaagccaattaaaagaggcattgctatccgaaagtcctcttgaagaaatcaaagcccgtcctgctatcatgaaacacgaaacatgggcaaagcgtctgcttgaagagaacacctttacagaggacaataccgaaaccattttacaacaagaaattggctctattttttctcgaattctctcgcaggcgggtgtgtttaaaagaactgagcaagggaaaacagcttttaaccgtttcattcaaacacttcatacaggcaggtgattagatgattgaacaagtaagagagctaatggaagaaaagcagcttgatggtgtcttgattcaaaagcgaaataacttctcctggctgacaggcggaagaaggaatcacattgtgttaaatacgccagagggcgtgtgccagctgctcgtcttaaaagacgacctcgtcctcattgtgaatcaaatggaagaaaagcggatcattgaagaggaaatggcgtatgtcgatcatccctttcaggtggtcacaatggattggtatgaggatgagaccccctacattcaagaactcacaaaaggtaaacgaattggggcggacattcaaatggatggattcgaatggatcgagccggatttgtcacatgttcgatcgatccttactgcctcgctgctcagtcaatatgaaatcctttgtcatgaaacagcggtcattgtagaaagtgtctgtcaagaaatcgtgccagggcagaccgaacacgaaattgcttcgcttattgctcaaagagccattgcacaagggatgacgatagaagtcctgcttgtggcaacggatgaccggatccatcaataccgtcacccgattccaacagagaaagcacttcaaaagcacgcgcttgttgtcctctgtgcagaacggcacgggctcgtagcgaatgtcacaaggtctgtttactttggtcagcttccaaaggagcttgaagagaacaaagagcggcttgcacgaattgatacagtcatgaatgccgccacacgtcctggtaaaacattaggagatgtactgaaagcaggtattgctcagtatgaaaaagagggcttccctgatagctggaaaaagcttcatcaagggggaaagacgggatttgtatctagggaaatcattgctgttccctcatcgaaggaagaaattcagctgcatcaagtgtttacgtggaatccttcattgcctggactgaaatcagaggatacgatagtagtagaaaaagagggcaaccgctttttaacctatacaggcaagtggacgtacatggacattgaacatgaaggggagatctatagacgacctgacatcttagtgagagatgaataaatgcagagtgccggcgctgagccggttttttgctggaagtctttagcgagattccactaattcagcatcattaccaattcttacagcgtatcgcagagaatcgatactttcttttcttgtgaacttgcgttaaaatgagtaaggtttttgttaaatgtggggatacctatttcaaaattgtttacctagataaaatttcattaagttaaattgaaattcgaccaaacttttttattgtggtaaacctaaatttgacaaagttcttgattgtttgtcctttgccttcaactctcaacttttcaaaatcctagaaatttattgtgtgtgcaataatataaatttatgtcgaatttatgacattttaatagaaatctgttgaaaaataaatgaacttttgaaaaaagggaagctaactctaacagattttgatagcattacaaagggaagaaaagttttcgaaggcagatggcttttcacaattattcagcaatttatacattatctaaggaaggatggtgatcttcttgttcagagccattaaacctatgcttttattagcgatgctcgtgagtgtttttttattaggaggttgcagcaatatcgctgttttagatcctaaaggacctgtcgcagcacaacaaaaagacttaatccttttatccatcggattcatgctctttatcgttggtgcggtatttgtactgtttaccatcattttggttaaataccgtgagcgtaaggacgttggaaacgcctcttataacccagaactacacgggaatacgcttctagaagttatctggacagtgatcccaatattaatcgttgctgccctttcggttccaactgtaaaaacaatttactctttggaagaggcacctcaagcaacaagccataaagatccacttgtcgtttatgctacagctgttgattggaaatggatctttagctatccagaggaaaatattgagacagtgaactacttaaacattccaaaagatcagccggttttattcaaaatcacttccgctgatacaatggcatcactatggattcctcagctaggcggggagaagtatgcgatggctggaatggagatggaacaatatcttcaagctgatcaagttggcacatatgaaggaagaaacgccaacttcacaggcgagggctttgctcagcaaaaattcaaagtcaatgcgatgacgcagtctgactatgataaatgggtaagcaaaacgaagaaagaagcaccaaagttaacgaagaaaacgtatgactacttgatgcttccggatgctgcagatgtgcagacattctcatcaacacatttatcctttgcgaagcatggagaggattctgaatacgcactccaagcacgcaaacgtttaggttaccaatcagtttctccgcattccaaaacagatcctttcgagaatgtgaagaactataaaagaaaactagataatgaataaactgactaaggaaaggaggaggccgttatgcatttgaaatgggatgagttttttgtaactggagacccattaattcttggtgcgcaaatttctatcgctcttacttccattgctatcgtgtttgttttaacctactttaaaaagtggaaatggctctggaaagaatggctaacatcagttgatcataaaaagcttgggatcatgtatatccttgctgctgtgattatgttcttccgcggtggggtagacggactgatgatgcgcgcgcagctggcgcttcctaataatacgtttttagattccaaccactataatgaaattttcacaacgcatggtacgatcatgattctattcatggcgatgccatttttaattggtttaatcaacgtcgttgttcctcttcaaattggtgcacgtgacgttgcattcccttatttgaacaaccttagcttctggacattcatggttggagcgatgctgttcaacatttccttcgtcattggaggatcaccaagtgcaggctggacgagttacatgccgctcgccggaaatgatttctcaccaggacctggacagaactattacttgctcgggctccaaattgcaggtattggtacacttatgacaggtattaacttcatggtgaccatcttaaaaatgcgaacaaaaggtatgacacttatgcgtatgccaatgtttacatggacaacattgattacgtctgtcatcatcgtattcgcattccctgtattaacagttgctttagcacttatgacatttgatcgtttattcggttctgcattctttacactcgaagcaggcggtatgccaatgctttgggcgaaccttttctggatttggggacatcctgaggtatatatcgtcatcctgccggctttcggtattttctcagaaatctttgcgacgttctcaagaaaacagctgtttggttacaaagcgatggttgtatcgattgtggcaatctctgttcttagtttccttgtgtgggttcaccacttctttacaatggggaacagtgcagcggttaactcattcttctcgattacaacaatggcgatttctgtaccaacaggtgtgaaaatctttaactggctctttacgatgtatcgaggccgtatcagctttacttcaccaatgctttgggcacttggtttcatcccgaacttcgttatcggtggtgtcactggggttatgcttgcgatggcagctgcggattaccagtaccataacacgtacttccttgtatcccacttccactatgtattaatcgcaggtactgtctttgcttgttttgctggtcttgttttctggtatccaaaaatgtttggttacaagctaaacgaaagaatcggcaaatggttcttctgggtattcatgatcggatttaacatctgtttcttcccgcagtacttcttaggactgcaaggaatgccaagacgtatttatacgtatggaccagaagatggctggactgcactaaactttatttcaacaattggtgcatttatgatgggtatcggattcatcatcctttgctacaacatctactacagctggagacacgcgaaacgtgaagtgtctggagacagctggggagatggacgtactcttgactgggcgacatcttctgcaattccgccgcattataactttgcagcacttccagaagtgacaacaccagatgcattccatcattggaagcaaaacaacgtaggcgttcatcctgaaaaagaattcaagaaaattcacatgccgcacaattcaggcagaccactcatcatgtctgcattcttcggacttggtgcattcggtcttgtatttgaatggtactggattggcgttattggcttaatcggtgtattcgcaacaatgattctacgctcatttgaatatgacgatggctactatattcctgttgaagaagtgattgaaacagagaaaaagaataaggaggcgcagaagtaatgggacataatgatagcagctatgcaaatgcaccgcttgaatatcagtctgaaacaggacgtttaaacatccttggtttctggatattccttggcgcggaaatcgtgttattctcaacactttttgcgacctactttgttcttcatggcagaacagctggcggcgttttaccagctgagctgttcgatatgaagcttgtattgatcatgacattcctgctattggttagttcatttacatgcgggattgctgttcatgaaatgcgccgtggaagtacaaaaggggttgtcatttggacgattctgacactgcttctaggtgcaggcttcgttggctttgagattttcgagttcttccattatgtacatgagggtgcgagcatccatacaagtgcgtattggtctgcattctttgtacttttaggaactcacggactacacgtatccatcggtatcttctggattaccggggtcttgttccaaattaaaaaacgtggattaactccacaaacagcagcgaagatttttatctcaagtctatactggcatttccttgatgttgtatggattttcatcttcacagctgtttacttgatcggattaggggggcttttgtgatatggctggaaaaacaaattcctcagcagagcacgaacacttcccttggaaacacgtagttggcttcatcctatccattgtgctaacaatcttagcattctggattgccattggagctgaaattggcagttctgcaaaactatggattatctttggttttgctttcattcaagcgttcttgcagctattcatgtttatgcacatgacagaaagcgagaacggaactgttcaagtcggaaatacattgtttggtctgttttgtgcgattatcttcgttatcggatctgtttggatctttgcggctcactacagccacggagagaacagcaaagatggttattcaccttctgcgccaaagcagtctgagcattcagagaaataataaaaaaaccactcatccctcaaaggtgagtggtttttatcatgatgttgattacgcctccaataggtggtgcgtgatttatctggtgctgctgaatcttttgcgaatgaatggaagtccataaatgagaaacgctgcaatgtgtgccaaaatgacgttaatggcaaagaatgcgatcatgaaggtatgtcctgctggagataaactgctcgtcatgtaaagaccgaagaaaatccacataatcataatgggtggaatagaagctagtgcaatttttctgttttcaagccataaaaacaggggtgtagccgttgcaatacataggtacgcaaagaacatatccatcgtatccaactcctttgtaagttgatatccaaatcaaatgagaggtcaggatgcaattgtgtctgtttttaggagatattgtgaacattttgttacaagtattataccacaattgactttgaagtaaactcaataattggaaaatgggccttattccgtagaaagtggctttttccttttctctccgtacagcttatgctggcttgataattgcttgtcatatcgccacataggtcattgaattttccccttaatatctgtaaaataatctttttaaaggactcatgatcggatgaatggaaagagtatagaggaattttttcctattgttagaatgaaaagtatttcattttttgaaaaatgattggaacctttcggatgtatcttccgtcatatttaaggtgagttgcttttgtgaaaaattcaatctaatataaataagggcttttatgttttgtaataagggtggttagttcatgaacaagcagaatacatctccgtactatcaaggggatttaatttttatatttttagccttctttgccatcagtgtcattgcgatttatgctgcgggtcaatttggacagtatggatctaatgcatggacgaggcagattatttactacatggtcggagttatatgtattgtagccataaattactttgatttggagcaattagagaagctaagcctctatatttttataggtggcatactgttgttactttttctgaaagtcgctcctgcacaaatcggaggtcatgattttgctccaattaaaaatggtgcaaaaagctggtttgtgataccagggattgggacacttcagccttcagagtttatgaaaattggtttgattatgatgcttgcatctgtcatcggtaagtcaagccctagaggaaaacggacattagaagatgatatcttcctactattaaaaattgccggtgtagcagccgttccagttggactgattttcttacaggacgcaggtacggcagctgtctgtatgtttattgtcgttgtgatggtgtttttatcaggggttaattggaagctgatttctctcatcggttctgtggttgtgcttttagttgccgctgtgttagccgtgatcattctcttccctgatgttgcgaaaacaattggcattcagcagtatcagattaaccggattaccgcttggctgcctgatagctctacgtcagccaaccaagcgcagactcaggatgcgtctgggtctgataaatatcaagtagaccaggccattatggctattggtgctggacagatttttgggaatggggttaaaaacttaaaagtctatgtcccagaggcacaaacagatatgattttctccattataggagaagcctttggctttgtcggatgtgcgtttgttgtgatcatgttcttcttcttgatctaccggcttgtcgtgctgatcgaccgtatccatccttatagccggtttgcgtcattcttctgtgtaggatatacagcactgattgtgatccatacgttccagaacattgggatgaatataggcgtgatgcctgtaacagggattccgctcctatttatcagcttcggaggaagctctgtcttatctgtccttattggattcgggattgcttataacgcaagtgttcaattaacgaaatatcaaagttatttatttaaataaaacgggtaagggcagtctaagtatagactgtcttttttcatgcgagttttaatttttgaaaagccatatgtctttgtcatatgatagtacaagtgaaggaggtcttcgaattgaacaaaacgatagaaacgatattaaatcatcggtccatccgttcgtttacagacgagcgtttgtccgaagaagaggtgctgacactcattaaaagtgcacaggctgcttcgacatcaagctatgtacaggcgtatagtattattggagtgacagatcaagagaagaaagccaagcttgctgaactggctgggaatcagccatacgttgagaagaatgggcatttctttgtcttctgtgcagacttgaaacgccatgatgatattgcaaaaaaagcaggggaaaatcatcaggaggcgcttgagaatacggaagcctttctcattagcgtcattgatacggcgctcgctgcgcaaaatatgagtgtagccgcagaatcaatgggacttgggatctgctatattggcggtctgcgtaatcaactgaaagaagtgtctgaattacttgaaacgccatcttatgtgctgccgttatttggtctggctgtcggacatccagcgagtcaatcgtcacaaaaggaacggctgccagttgaactcatttatcatgaaaatgcatatcagcaagatgaagcgcatgtggatcgttatttaaaagaatacgatgatcgtatttcatcatattatgaagaacgaacaaacggagagagaaaagatacttggtctaagcagatgcttcgcggctttagtcagccaaagcgtgccttccttggagaatttgttaaagagaagggctttaatcgaaaataaataagacatcccccctttcgattgagagagggggatttctgtaagaggtgcagcatgatgaaattaagtatactggatcaatctcctttgatcggagatgcaacacctgctgaagcattgaagcaaacggttgaattggcaaagcaggcagagaagtggggctatcaccgtttttgggtatcagagcatcacttttcaaaccggcttgcagggtcgagtccagaggtgcttctcggtcatttatcagccgttacgtcacatatacgtattggctcaggcggtgtgatgctgcctcactatagtgcctataaagtagcagagaacttcagggttctcgaagcactggctcctggcagaattgatcttgggattggacgtgctcctggtggtatgcccatttcctccattgcccttcatcatggtgaacgaaaacgactaggtgatcaatatcctgagcaggtagaagaattgaaggtctatttacacgacctagcggatgaattttacccgctgccccatttaaccgcttctccgaaggtagagactgcaccagaggtatggattcttggttcctctggagggagtgcaagacttgcggcgaaagcaggtgcaggctatacgtttgctctatttatcaatggcgaaggcggagaagattctgtggagcaatacatcaaccggttcgaaccttcagcattcggtgatgagccgcgcgtcagtcttgcggtcttcgttttatgtgctgaaacagaggaacaggcagaaaaactggcagtcagcttagatttatccttactcgccaatgaacaggggcaaaacctcgggggctttccttcatatgaaaaggcacaagcttattcctacagtccatatgaacaaaaacgagtggctgccaatcgtcaaaggatggtggttggaacgccatcttctgtgaaaaagcagctgacggcactagcgaaagcgtatcgtacaaatgaagtaatcgctgtgacgatcactcaccacatgcaagaccggctcacatcgtatcgtttattaaaagaagcctttgatgcataacgtatgtatgtctgtttaccgtccacgcagccaatagagggggaaaaggagcatcatgatgaaaataaacgcggctgtcaccagcaaactaagcgggtaaatgaaggacacatagaccgtcagctcgcatggttgatgaaaaggacgaggatgtttcgaaaaaatacaccaaagtgatcgttagaaaaaaagcagtcaaaaaagaaacgatccatagcaatatcaacatcaaactctctttcctccatatataatcaaaaagccttgatgagctaatccgctcatacaaggcttttcttgtgattcacgtttattcaggataaatatcgaagggttccttcgtttgaacagtgtctgatttccctttcaaacttgcatacgcaagcattgtatactcaccaggttccagcttttgaccttgattgatcgtgccattccattttacgcggtgttctcctttatctacatgttgataaacacctgcttcacctaaatactctccatctgtcgagtagacgagaaatgcaaggttctcagcgccaccaggcagatagctgctaatgacatagcttccagcacggttatccggctcaacggaaaccgaagtgacgcgcggataatcaggctcttttacaatcaataaagtaggaatctctgtgacctttctgccattttcacgaagggtaatgctgccttggtacgttccttttttggttttaccgtatttcacttgtaccgcggaagtaaaggacccagtggaattccctttgacagtgatttttttcgttccgtttgtgctgatgccgctgccattgaatttgtaatcaatggtatacgttttcggtgcttttgaaaggttttctaccttgaatttcttcgttttgatttgaacgcctttttctttcaagaaagtgccgtaagaatagctggcatcagaaacgatagatgacgcttggagtgattcgatgattcgaacactgcctgtcccttgtgtgttatgagggaatgggctgccatttgcgtcaaaaagtttttctgctgtattcatcatcagtgctttgatctgttcagttgtgtacgatggttttgcttgcttgatgatcgctgcgacccctgccacatgcggtgaagccatgcttgttccttgctttgagccatatccgtaaggctgagaagggttatgcgttggaatcgtactcacaatgctgacgccaggtgctgataaatcaggcttaatcatccacgtatccacaactggtccgcgagatgagaagtcagcgacttgctcactaagttctttgacaaattgaatggagaaagtcgttgtattgtttccagcctcaatggctttgacaagcgccgttccttcagcttttgaaagcttaatcgtaggaagagcgagacccggtacatcgactggaatttctccatcggtgttgttatacatcacaacgccgattgcaccagcagcttttgcattgtcgactttatcaacaaaggcaatggctcctcgttcgatcacggcaacctttcctttcacatcgatgtcttcaaatgctttttcgtcaccgatacctgcatggacgagtgtgacttgtttttggtcaagtgcttttaaatcactctcttggtagtagcccatcacttttgcagtagaatagttcgggaatttcacactataaaggctgtacggaagttgagttgctccgacagaaatggcatctcttgacgtgccgggagaaccgactgtccagctgttcggtccgctgtttccattcgatgtgacagcgacaacgccttcagacatggcccaatcgagtgcgatgcttgtggcataatcagggttattcacactgtttccgagagagaggttcatgacatctgctccatcagtaacagcgcggtcgatgcctgcaagaacgttctcagttgtcccagacccgcctggtccaagtacacggtacgcaagaagtgtggcatcctttgcgacacctttaatttgtccattggcagcaattgttcctgcgacgtgtgtgccatggtctgtcgattcacctctagggtctcctttaggcgtctcttgcggagaataatcgttatcaacaaaatcatagcctttgtataaaccaaagtttccttttaaatcagggtgggtatagtctactccagtatcaatgacagcgacttttaccccttttccagagtagccggcatcccaagcttttggtgcaccgataaatggagcgcttttatccataagaggggagacatcttcatttggaagctgaatgctttcctttttcacttcatctgttttatatgtaacatccggataaacggcttttactccgtcaactgctagcagcttcggaatttcgtttgcaggaagtttcatagagaaaccagagaagactttttcatattcttgacgaacactcgctttatcaatttctttgagtgctgcattttttacttttgttcgagattttttgagggaggcctttgtttgagctttgccttcttgcttggcttcaactaaggatttttcctttaattcaacaataacagtggtatgttttctagagttgacattgatttcaccgaagatttctgctttttccaattccacctgtttgttcgatggagcggcagcagcctgttgacctgtaaagaatgtggataaaataaaaatagtggagaacaatagaacagaagaacgagagatgacctttttcattaattttcccctttctagctgtgtttttagggagatagcctttctttttgtggataaataggaaagattcactgcccgttattaagtattcaatacgatgaaaacaattcctttactaaaatggtcttattttacatagttataaagaactattttgtttataaagtctcacttatgcacaaactcctgttgataactcaattatttagatatatatatggaaaataaaaaaatcgcatacacaaaatctagtaatgggatgttgatatgtggataaaccctgttgataaggtgtgcttatcttttggatagagtgtgtataaaatttttattcaaacatcctcgtacttgatgatcttctgcacttttcaacaaaacttctgaaaactagtttgttttttcacccagattgtgacaaacctctcttttttctcgggatatgataggagcagttgttttgctagaactgctagattctaagaaaagcggagggatgttcagtgaggaaattcaaaaactggttgagtgtatggtttggtttcatgatgaatgtgcttgtgaatcctggtgtgatgatgaagcagcaacgttttcaggcggccgcggtggatgataggttctttcaagtcgtgaaagagagagagctagagaagctggcagaagaaaagaagaagaagcgcaggtcagagaaaccgtttaagcaaagtctgatgatgcttgatgagaagacggcgagagaggcgcgtgctggtccgctcttacctttacatgagagatgaaacagggtaaaatccctcataagaaacgttatctggtgggagaggataccccttgaagatatataagatattgaataacaatgcggtgattgtaaaggaaggtgatcaggagaaaattgtgatggggcctggaattgcttttcagaaggggaaaaatgacgtcgttcccgttcaaaaaatagagaaaatctttgttgtgcgtgaagaaaatgagaaattcaaacaaattcttgcgacattgccagaagcgcatattgaggtggcagagcatattatcagttatgcagagggtgaactgatgatgccgcttagtgatcatattcatatatcactgactgaccatttatcctttgccattgagcgcattcaaaagggcattgtgctatataataaattgcttggtgagatcaaagtcttatataagcaggaatatgatattggaaagtatgccattcgttatgtaaaggatcggcttggggttgaactgccggacgatgaggcaggatatgtggcactccatattcatacggccaaaatgaatacggagtctatgaaaaagaccgtgaaatatacaacgatgatcaaagaaatgatcgagcatatagaaagctattttcagcattcaattgatgaggatagtatttcctatcagcggcttgtgacacatttgaggtatgcattaggcaggttggaatcaaatgaggcatttcaaatcatggacgatgacatgctgagttttatccaaacaaagtatgatttggcttaccagtgtgcacgtggactcgctgatttgttaaaaaatgaatatgaacttcatctccctgaatcggaaatcggctacatcacgctgcatgtccagcgtctgcaggatgccgaattggtttagtggttgtgcctgcatgcaggcttttttttatgcacactactcttattagtgtatatgggtcaattgattcgaaaaaagaggttgacgcacgtctcactcttatactatgatgaaagcgtaatcaaaatttgatatcgtgggattgtgactgccaggcaggcaagacctaaaatttgcgtaacgaggggacgtgtatgtccttttatcgttggtgaattttaggtcttttttgctttaaaaaaggaggagacaacatggattatcaaaaaacagccaaagaattaacaaaacgattaggcggcaaagaaaatgtcatcagtgccacgcattgtgcaacaagactcagattggtgataaaagatgaggaactgattgacaaagaagccattgaggaacttgaaggggtgaagggggctttctcaagctcgggacaattccaaatcatttttggaacgggggcagtcaacaaagtatatgaaccatttgctcgtgagactggtcttgagacaggagacgagaaacaaaagcctgtcagccatgatgaagcagtgaaacaaaaaatgaatccacttgcacgttttgcaaagacgttatcaaatatttttgtaccgatcattccagcaattgttgcaagcggtttattaatgggcctattaggcatgatgaaagccttcaaatgggctgacccaagctctgcgatcttccaaatgcttgatatgttctcaagtgcagcctttatcattttgccgattttaattggggtcagtgcagcgaaagagtttggtggaaatccgtatttaggagccgttattggggggattatgattcacccgaacctgctcaacccgtgggggctgacggatgcgaaaccagagtatatgcatttattcaattttgatattgctcttcttggttaccaaggaacagtcattccagtcttattgactgtgtacatcatgtgtcttgttgaaaagaatttaagaaaagtggttccgaacagtattgatttacttgtgaccccgtttgtgacggtgattgtgactggatttgtgacgtttattgcagttggaccgcttggaagaatgctcggtactggaatttcgaatgcattgacatttatttatgatcatgcaggcttcttagcaggactcattttcggaggtgcctactctctcattgttcttacaggggttcatcatagcttccatgcgattgaagcaggactgctgaatgatattgggcgtaactatttgctgccaatttgggccatgtccaacgtagctcaaggcggggcgggattggctgtctttttcttagcgaaacgcgcgaaaacaaaagaaatcgcacttcctgcagctttctcagctttcctaggtattaccgagcctgtcatatttggtgtcaacctccgctatcgtaagccgtttattgccgcgatgattggaggctcattaggcggggcatttgttgtcttcacgaaggttgcagccaacgcctatggtttaacgggtattccgatgattgcgattgccgcgccatacggtgtgcagaatgtggtgaattatgtgattggtatgttaatcgctgttgctgtttcattcactctcaccatcatctttaaagtaaaagaagtagaaaaataatcaaggagtggtcacagttatgacaacaactgacgcagcacttcgtcaaaaggtagcagaccgtattcgaaactatgagcatttggtgaaaaaagatgtgtaccgtcagcattttcatttaatgccgccagttggtcttttaaatgacccgaatgggttgattcagtggaaaggggtttaccacgttttttatcagtggcagccattcaaaacgggacacggcgcaaaattttggggccattacacatcgacagatctagtgaattggcagcacgaggaagccgcccttgccccaagtgattggtttgatcaaaacggctgttattctggcagtgcagtcattgacgatggacagatgtacgtgatgtacactggaaacgttcgcgatgaacaaggaaaccgtgagacatatcaatgtttagctgtttcagaagatggcattcattttcagaaaaaaggtgtcgtggcgacgctgccagaaggattcaccgcccattttcgtgatccgaaagtatggaagcgaaatggccagtggtacatggttcttggtgcacaaagcctggacctgaaagggaatctcgtcttgtttacctctgatactttagacaattggacgtttcaaggcatgattgctggcagtgggaaaaatggattagaggatttcggttatatgtgggaatgtccagatctatttgaattagatggccgggatgtattgattgtgtccccgcaggggctcaagccggatggcttaaaatatcataatacacatcaatcaggctattttgttgggagattggatgatcatacctatcaatatacgcacggagcgtttgaggagctggaccgcggctttgacttctatgcgcagcaaacctttctagacgaatcaggcagacgtcttttaatcggatggatgggggtgcctgatcaaggagaagagcatcatccaacgatttcgtatcaatggatacactgcctcacgatcccaagagagctgcgtttagatgataacggacatctgattcaaaaaccagtcactgagctccaggcgatgagaaccaatgaacaagagaatgtttttcatatcaaacgctccgtccaatcgattcctgtagatgatattacaagcgcagaggtattcattgatcaaattgacacacaaaaagggtttgaatgctgtattcgagcggcagcccgtatcatttatgataaagatgaaggcaaattaacattagagcgagatcgatttgaagatcgatcaaaagaagttcgagaagtagcaatagaggaattacacgaccttcacatctttatcgatgcatcgtcgatcgagatttttgtaaacggaggccgagaagtatttactgctcgttactttccttccccgggaaataaatcaatctcgatcagtggcagaaatgaaacaaagcttaaactaaaaacatggcatttacaaagaaaagcagatcaatgatctgctttttctagtgaaatccgcctgcatcttagaacctatagcatgtatatacaagggtggtctgaagcggtttgatgacgttttacatatatgataacaagtggaattatggtatcattttaaaatatatacagctgaggctgacgtttatccaaatgcggtaggacaaaaaggggttgtttacttgaattcaaaacagcagccgacgactagaaaacgcttggagacaatggcagatcatgttgaagataaacgtgaagaatataaagaattgctcattcaagtccaatctattctcggtgaaccttctctagagcaggaagaattaaaagagaagctgtcagatacgtataaacaaatgaaagaatatgccttatttgttgaatccattgaagcctttattcgaaaaatggcgaaagaatctgatcagcaaaagtaggtattcgtgtaaggaaaagtgtacctgcgtgtgggtatgctttttttcatgaaatgaaaatgaaaggtgacgtcaattgaagatagaaacgtatatttatttggaggacaagaagaagtttgtacccattgatgatattgaaaagatcaaaaccttcgttgctacaaaagaagattttatggaacaagggtacggaaagatttattatccaagtttacctctagaaatacagttggagagaaaatccgatcgagaaattatgttatcacttgaaaatcagatattggtggccgactttaaagagtttgtatatcaactcattgaatcaggtcgtcaatttatcgagtttttaaaagtgattacgggaagacctgatgatagtgatttacgtgatgaatttgagagaatagagaaggtatacaagagcttgtaagtacaaacaaaacccgattcgcccattaacaaggcgaatcgggtttatctattctacttatcaaaacgatgagcagaatgcttcgttggtccgatgtattcatttagctggaaagagcctttgatggcagctgtgatgaattcttttgctgcataaatggcttctttcacgtctgagccgtttgccagttcagctgtgactgctgctgagaatgtgcagcctgcgccgtgtgtgtattctgtgtcgatcttctctgtttcaaggcgttcgaaggtttgtccatcataaagcaaatcgatcgctttatcttggcttagcttaccgcctcccgtgatgaccacatacttggcaccaagttcgtgaatgcgttttgctgcttcttccatttgttcgatcgttttgatctcaccgattccgcttaattgacctgcttcgaaaaggttaggcgtgatgacggttgccagtggcgtaagcttttcgcgtagtgcttcagcgtgctccggatatagcacttcgttcgcacccttacaaaccataacaggatcaatgacgatattttttaggtcgtatgttttgatagtgtcagctgcaagttcgatcacgtcgaccgttgggagcatacccgttttcagtgcatctaccccaatgccttctacaatggtagagagctgcgcacgaatcgtcgccgtatcaattggaaacacctgatgatcccaatggttatgagggtccattgcaacgacaacggttaaagctgtcatcccgtagacgtttttttcttgaaacgtttttaaatctgcttggatacctgcaccgccgcttgaatccgaccctgcgatggtgagtgctttattcatagacatagttgctgaacctccaatgtgatgtgtaacagttactgttctatcccttattataatcagcttttccgtttatcacaatgaaacgacataaaaaagcgttccaccctaggaggaacgcctttctccttaccttttacaaatcaccaattttccttttttcagttcgtctaaaagtgttaaggttaattcctgatccgcgccaaccgacatcattttggccatgagctcgtcatcccgggtgcggatgacattggctatttgatctaaaatcccttgatcgaccgctgtcatgcttttggcatttgtatgctctgtgacggtatcagagcgttctggatcgtacgcaaaaacgaaaatatcatcctttgctgaatgtatttgttcaatggtctgtttggcttctttgctattttctactgtgaagtattccatcgtgatcactccttttcatcaaaaattcccattttcccgtcacatcaaaccgccttttatatcatgagaagaacgtcattttatgttttaatggaaaaagacgaatctattaaaggagtaagctgaatatgaagatttccttattaattgtgacacataaccggctcagcgcactgtgtgagctgcttgaatccattacgagacaaactgtacagccttttgaaattgtggtcgtgaatgatgcaggagagcgagtcgacatcatccaggaactctactctgaacttccgatccgcttgatccatttagatgagaatgtccagcatgtgaatgctagaaacgtgggggtgcgggagctgacaggcgatgtcatcatgctgagtgacgacgatgattactttacaccttgtcatattgaacgtatgagtaaggcgctggaggacgccgattttgtcttttctgatgcagaaattgtgtcatttgaagaaaaaggcgcgacccgtttcccggtgtcgagacgtttatttgcttatacagcagctattgaggatatgcgtgttttttctacctatgttccttccggcagtatgtacaaacgctgtatacacgatgagattggctactttgatccagcgatgcatcattattgggactgggacttctttttgcgtgtatcacagcatgcccgtgtcaaacgagtgccagctgccagcgtgatctatgcgttttttgacggcggtgggaatcagtctagtgatcttggtgaaacaaggaagaactacttagatgatctaagtgaaaagcatgggctgggtgacctgccgacagctaactttgctgtcttattagaagaaccagcgatgaaaaaacgagaatcagagagtgatattgtgtgggacggaaaaccgatgatctcaagactaacgcagcaaatagaaggaggagaaccccaatgaagccatttttaaatgatagctggtgggctgtgatgaaaagtgaatttgaacagccgtattatcaggaattacgtgaatggatgaaggaagaatatcgcacgcagaccgtttttccgaaaccggatgacgtttatcgtgcgcttcatttgacgtcttatgaagaggtcaaagtggtgattttgggacaagacccttatcatggcccaggtcaggcacatggattaagcttttctgttcagcctggcgtgaagcatccgccatcattgagaaatatttttcaggagctaaaggatgatcttggctgtcctgttccaaatcatggctcacttgtgagctgggcagagcagggtgtgctgctcttaaacactgtgctgaccgtgagaaagggcgaggcgaactcgcataaaggcaagggctgggaacgtgtgacagaccgtgtcattgatgtgctgaatgaacgtgatcagcccgtcgtttttgtgttatggggaagacatgctcaaaataagaaagaacgcattgatcaaaacaagcattacatcattgagtcacctcatccaagtcctttttctgcaagaaacggcttttttggcagtcgtccgttttcaaaggtaaacgcgtatttaaaacaaatggggatcgaagaaatcaactggtgtatccaaggtattgagtgaaaagaggacgaggggagagccccttcgtcctgtttattttaaaaatttacgaaccaagtctagtccgtttttcgcatttggataacggaaggaaaaatcgaagcgattggtttggcgcaggacgcttttttcatgtgtaaaagtaaagaagctttctttcccgtgatatcgtcccatgccgctttcgcccacgcctccgaatggcaggtaaggggtagcgacatgcatgagcgtgtcattgatacatcctccgccaaatgagagatggtctaggatatagaattctgtttctttacttgttgtaaataagtaaagagcaagcggcttcggccttgttttgatcatatgcgctgcctcatgcagagaatcaaaggtcatgacaggcagaatcggtccgaaaatttcctcctgcatgacgggatcttcccatgtgatgtggtctaaaatggtcggagcgattttgagctcgtgttcattgcgctgtccacccgtgacaatcgttccatttgagaggaattgtgagagtctgtcaaaatgacgctggctgacatttttcccaaagtgcggatgtgtttcagggtgttcaccataaaagtcccggatacaagctgtcatttcccgcaaaaggtcctctttaatggactcatgaacgagcaaatagtctggcgcaatgcatgtttgccctgcattggtgaatttgccgaaagtgattcgcttcgccgctagtttgatgtctgcatcaggcatgacgatgcaagggctttttccgccaagctcaagtgtgacaggggtcaaatgcttagcggcggcttccatgacgattttgccgactgccacacttcctgtaaagaagatataatcaaagggcagtttcagcagctctgtactgacatctacaccgccttctacgacagctgcatggtcttcttgaaatacacgttccaccattgcgctgattatttgtgagacttgcggcgtcagctcagacggttttaagatgacggcattacccgcagcaatagctccgactaatggagaaagagccaattggaaaggatagttccaaggggcaatgatgagcacactgccgtaaggttctttgatgatcatacttttcgatccgatatgagtcagaggtgttcgcgcgtgtgttggctttgcccatttgtgaagatgcttgatggtatgattgatttcttcatataccatcccaatctctgttgtataggcttcttgttcggatttatgtaaatcatgggctaaggcttgtaaaatatccttttcatgctgtttgatttctgcttttaagtctttaaggagacggatgcgttcttgaaccggcggcttttgaaagactttttgtttctgaaaaagagcagtgagtttgtccattattcaatcctttcatagacgattttgttccttttattatgtgtgaacgaccatgccgggtcaaataagagcaacatgagcgcactgctttgaaaaaatgaacccatttcgtttgttcatttggtaaaataatgttggaaaacgaattttttagattggagggtatgcccttgaatattcatatatcaagtctgcttcaaaaaatggaggaagcggttcaaaaggcgaaacaaagtggaaatgatgaagaggtgaaacgtcaagtggcggcgatttcttcactgtgtgatgtcattctcgatgcaccatcacaggtgcaaatgccgcagtcgccggttatctcgccaccttcttcgatacagacaccgtccgcgccgcccgtatcctcagatcaagccatgcttgagaaactgatgggtgcgagtggtgcgaagaaatttcagcatcaagaagaggggcaaaaagagaaggatgggaacggcgactctatttttgatttttaatggtcttgtcacgacaaagggaaggtgatcggtttgaaactatttttgggcgccattcagtggatggcattttttatcgcagcttctattgccgtacctattgcgattgcacaagcgtttgaattgaaccaagtgcagtcagcggagctgattcaaagtacattcttttcacttggtcttgtggcgatggtgcagtgtttatgcggccatatgctgccgatcaatgaaagtccagcagggctttggtggggtgtgtataccctttatgcaggcatgacaggaacaatttttgcgacgtatcctgaaaccctgcaagccttacaaggagctttaatttttagtgccgcattcttttttatttttagtttatttaaaatcattaattggctcgcttctttatttacgccagtcgtcacaggcatttacttgctgctgctagttgtgcagttaagtcagccgatcatgcaagggctgatgggcatcggctatcgaggaaatcaggtggacgggcttgtcttttgcttatcgatcttgattattatccttaccttcatgatcagccgctcaaaatggcattacttaaggcagttttctgtgttatttgcccttgcaggaggctggctgttattcgctctactcgggttggcaaagccggttcgaattccagaaaaaatcatcgagtttccgaagctgttcccattcggcatgccggtctttgacagtggactacttgtcacgtccttttttattacgatcttactcattgtgaacatgctggcaagtattcgaattgtggaaagttcagtgaaggcatttggtgaactgcgtgagcggaagagagctcggccggctggttttgtcgcagcatttggtcacttactgagcggattgatcggtgccattgcgcctgtacctatttccggagcagcaggatttatacagacaacgaaaattccatcgagaaagccatttttcataggaagtctgctcattgtactcattagtttgttcccgctgctcatgagctttttctccgcattgccatcacctgtggggcttgctgtaaactttgtggtgttctcctcgatgattgggattgcgatgtcagagtttgatcagtatgagaaagaagaaattccgcggattcgctttgtcctagggattgccgttttagcaggtgtaggggcgatgtttgtaccgcagggagccttgaaaggcatgcatcctgtgctcatttcattattaagcaatggtcttgttctaggtacactcattgcgattgcggtcgatcaagtcctgttacgaaagaaaaagaaatccgacaatctcgtgtcaacgtaaaaggaaagttgaatgtcgtctgtcacccgcgctatgataaacataattgacgagataaggagaatgacgaatgaaactatttttcattttaggtgcgattaatgccatgctagctgttggactcggagccttcggtgcgcacggtctggaagggaaaatccctgaaaagtatatagacatatggaacaaaggggttcaatatcagatgttccatgcgattggattatttattgtcgcctttcttgcagataagctgtcaggtgtttctctagttcccaccgctggctgggtgatgcttgcaggcatccttttcttctcaggaagcctttacgtgctggcattgacacaggtgaagattctaggtgccattaccccaattggcggagtggcgtttatcgcttcttggatcatgcttgtcattgcagcagcaaaaaatttataagtcaaaaaaccgatgctctgagaggggcatcggtttttttcttaattccagtaaggggcataatttggcggtgcttgataataagggatgtagtgagacggagggacaggatgcgtttgtgcctcctcttctctgtggcaaaatggtccgataaacacacttggcttcacaggctgtgtcgcctgcttccactgtgtttcgttcatacaatacgtatgtgccatgatgtgagcaggggtgagggtgagaaggtctgagcctaggatcacttctggcgtagatgcgttaaaaacggctaacaaatgagttctgtcttggagggcaacttcatagtgccaccagccttgaggtacgtttgccacctgtccaggggtgatggtataggtgtgcagtttttttgtgaatggattcagcatcgagacagcagcagaaccggctatacaataaacaagctctgcggcattttgatgataatgaggctctacgactttgcttttactcaaatatatatccagcagggatacttgatccaacgagtttaattgtttttttcctaaaacattaatcagattatgctgatcgtacttcacaagggggctttgactcagatcgtatgaatatttaacattcggtgatgtataatccagctcaacagtcattgatgtcacctctaggcgtttgataaaaactactaggcatcttatgaccagcgccttagaggtgtgacaaaaacctagtcaaaagaaaaaagcaagggcgcctgctccttgcttttgctatatgtggcgttatctatctcggagaatacgtggacatagagtatggatagtcgtattgaatttccccatcaaacgtaatgtaatcaagatagatcgttaatagtaagtatcgtgttcccgtcttattatcactaatgataatgtggtcacgtcctgcagcttcaatgacgcctctgaaaatcttcgagttccattccttacttgcctcaaacgtcatgtaaatcgtggctaccttgccgcggttcaatcgtaaaatattttcaatataggactgctcgattggcagctgaccagtgacattctgctgataaatcggtccagaaggaatttgatacggctgcccgccgctctgcgtgccctgccccccttgtgaagaaccagtagacggcagtggtgaaaatccctgctgcatttgtccttgcatttgaccctgcatttggggagggactgaataacccatctgctgcgcaggatacggatttgctccatattgttgctggcgaaaatcttgaccttcgaaacccgaaccttgcccaaattgatttttcaatttcataacgttcctcctctttcctcatggtgttctaaacagaaggcgcttaagcacctgttgtttccatagcattctttctctctttcacactatgagacaggaggatggaatatgtacattgaacgaaaaaaaggaactgcggtgcagttccttaggcgtgggcaaaccctcgcattctttgccagatctgcgcttcgttgctcacgaatatcaaattctatctgatgctcaaccttccttacatcatccaatttacagcgcgctggacaccaaataaaagtgtaatgataagaaaacatgccgcaagcggtgtgatcacaatgagaaaggcttgccataatctgagcttcatcacagcggcaatgcctaaaacagtcattccaaatatccacgtctttgcataagcatcaatcagtgtcaaaagatcgagataataccaaacttcataatgctgatctaaataaggtgagattttgacaaacgtatacggaccaagcattccaatagtgaaaatccaactgagtgaaaataaagcggaagggaaaaagatcgtcagcgtgcaggctttgagcacatctcgatatgctgtttgactgccaaataaaagatgccctaaccactttaggatgagtacaccgaaaaatagaaccagattgcctgcaagaataccatatcccgctccttgtaacagaataaaagggaacggaatatgattgcccatatactcgctaaaataaccttcgtagacccagcctgtaccagcgatacttgcaaggagcatcatcagccaaattggaatagaggaatgttgatatgagcgaataatcgtttttgttgcgacgaaaattttaaaaaatcgaaaaaaaccttttgcttcctcttcttgggagtgatcattcttcatagcttccaatgttctttactcctttaatacacataaatgattacttatattaccaaaaagttcgcgtttttcaaagatagatcaataaaaaaatacaattttataaaaaataggtcactctacagtctctttaagaggagacacatatgataaacatagtttgaaagagaccgaggtgaaaactttgacaaaagtaactgtcattatgacgagctacaacaaggcggcttacgtcggcagatcgattgaagcggtcttgcagcagacgctttcagactttgaactatttatcatggatgatggttcaaacgaaaaaacccttgctgcgattgagccctttcgcaaagatccccgtgttcattttatccaaagcggtgtcaaatcgctggaggagagaacagtgaaaacccgatacgccgtcctgattaatcaagcattagaactggcaaagggcgagtatatttcctatgccacagatgacaatgtctatgccccggaccgtttagagaagctcactcattatctagatgcacgaccaggtgatgatattgtctattctgcatcgaaagtaatctatttaaatagcaaaaaagagccagtaaaggaaacgattcgacctgcgcaaacggtgcaatggaatgcaccctgtgccatagatcattgctcggtcgttcatcgtgcatctattttatcaaagattcaagctgaatttgggtcttactgggacgagagtccgcatttttatcgaataggagatgcccggttcttttttcgattaaatcatttttatccgttctatccctttgatgaagttttagatacaaattacatcacagaacagtcgattcactatcagctggcagaagaagagaaaagtgcctttattcaagcacttcctgagcagtctacctgctgggagctccgccacatattaaaacaaagacatgggaggtgacctgaagtgtcgcactatattcatcattattggcaggtgtactttgagtatgtgaatctcatgaaggatttgtcctataaacaaattcctcttgggttgatcagcaatttctatcaatatatcagtcctgaagtaagggaacgcatggaggatgaagcattcggtcaagaattgacaaccgattgtccattgccggaagagattcagccattttttgatcagcataagcagcagatcaagcgaattgcttatcgtccggcgaatggaaaggtattgcttcactttgaacatctgcgttttactgaacaaaattacacgcggttccatacgagtcaaacggtggtgctcgctcgctggaagaaggcagattatttcggtttacccgtcatcagcaagccggaattagccggagaggttaataaagaagcccatgctgaatatattgaaaaagcaaatgctctccttaaaccttacgcaaagcaccccgtctttggcaatgtcttttttagagaaaagcttcggaaggacattgtgcaatttattgatgtgattgaccagacagaagttctatttcagatggagccaattgcagccgtcattgtggggacgacggaggatgcttacagccgcgtactggcactgcaaacagtgaaacgccagctcacgagtatctgtcttcagcacggcgcacttatgggagacgaagcctttttgccgattttcacgacgtgccatggggtgtttggaaagtatgaaaaggactggtatgtagacaaaggctgtcagccggaacaggtggagatcacaggtcatccgaggtttgatttggtgaaggatcgaacgccgcttcaacaggaactcatctttcgtaaattgaacttcaatcctgccaaaaagaccgtgcttgtggcaacgcagccgttctcagaagccttctatggtgatgttcttaaaacgattgcaaaacggaaagacattcagttgatcatgaagccgcatccgtgggaaattgcccgaaaccgattaaatgagtatgtgtccattgaacgagctggaaatcatgtgagattgattaaaaaagatatcgacttatatgacctgctgccatatatggatatggtcattacgctcacatcaaccgtcggtcttgaagcaatgctctttgaaaagagtgtgctgatcgggaaaatgacagaaggcagaagatacccttattacgagtcgcttggcagctatcatatggaaaaccctgttgaactggctgagaaagccattcgtattttgtcggatgatcaagagatgaagctggcaaagcagcaaggagctcaattcattaaacaacattatccgcatgcgcgatcgaccgatgttctgctttctctgcttaaaacaaaaacaggtgtggattttcagagatgaagataggggtgtgcaagcgatatggaaaaaaagagagcgcaatttcttccttatgccctgccgttgattgagcaggaagaaattgacgaagtcattggaacattaaaatccggctggctgtcaaccggaccaaaagtaagacagtttgaagaagagtttcggcagctgaccggtgcaaaacatgcgatcgctgtcaattcatgtacggctgctttatttttagccttaaaggctagagggattgggaatggggatgaggtgattacaacgcctctgacattctgcgcaacagccaatacgatcattcacacaggggcagcacctgtatttgtcgatattgacccagcgactctcaatctcgatgcagagaaactagaagcggcgattacaccacatacaaaagcgattgtccctgttcattttgctggtcagtcgtgcgatatggaccggattttagccattgccaaaaagtacgatctatttgtgctcgaggatgccgctcatgctctgtatacaacgtaccatggccagcccattggagcgattggtgatgcgactgcctttagtttttatgcgacgaaaaacatagcgactggagaaggcggcatgctgacgacaaacgatgatgcgcttgccgctcggatcagaagactagcactccatgggatgagcaagggagcatggaatcgttatggagaaaaaggaacatggtactacgaggtcgaggaacctggctataaaatgaacatgtttgatgtgcaggcatcgttagggcttgtccagctaagccgtctggatgatatgcaggcgcggagagaacaaattgcgaaagcatacaatcaggcttttcaaaaagaagcagggctgattctgccgcctgtccatcatgagggaagacatgcatggcatttgtatgtactgcaagtggatccaaaagaagcattcatcacacgcgatgagctgattgatcagctgcaaaaggagtataaaatcggcacgagtgttcactttatccctgttcatttgcatccatactatcaacaaacctatcactattcaccagaggatttccctaagtcactcgcttactacaagcggactctctcactgcctctttatccaagtatgacagatgaagatgtgcaggatgtcatcaccgcggtgctgtctattttaaaagaacagaaggcatcttcatgaagaccgttcatgcaatagacgatcaggtgctgtccgcttggctggagaaatacggccagaaagctgaacaaatgaaaggcttcaagcagtttggtcttgtcagtggcgcccagctcaaagcggtgctgttattcgactggtcaaaatgggaaagcggcatatttgatcagcatatttttcatgtgaagtttgcggaagctgagtcatcatctgcttttcaagaattgatggagcgcttcatcaattggatgagaacagaaaaatgcgattttttctttttacgtcttgaagcggctgatcttgaaaaaaaccgcatcgttcaaaggctgtcacatgtgtactatgtgggcggtctcactcggcttgaggcgccgcctgttcacatggagatgccatcaacaggtgaagatgtggtgataagtctgccggatgaaaaggaatacgatgaggcggtttcacttggtcatcaggcttttgtgaaaagccggtatgcactcgatccatttttagaccagaatgtcgtccagcatttctatcaagaatggatgagaaacaatttgctcggacgtgcagatatcaatctcgtggcaaaggtgaacgatgaagtcgtgggcttgatacaagggatgaccaagggcgatgaaatggcgcttgagctgtttgcgattagaccggatgtacaaggaaaagggatcgggaaaaaactgtttatcgagatgatgaaggtctcttatgagagagggcatcgttttatttctgccggaacacagctgcataacacaaccgccattcagctgtacgaaaagacgggctttagaacaacaaatgccttcttgtattaccatgtatggccgaaaaaaggagagagataagatggcgcatttctatattggagatcgcaaagtgggggatggtgcgcctgtttttatcattgcagaggcaggcattaaccatgatggaaagctggatcaggcgcttgctttaattgatgtggcaaaagaagcaggtgccgatgcagtgaagtttcaaatgtttcaagctgatcggatgtatcaaaaggaaccgggtttatacgaaacagccaagggagaagaggtatccattttttctttagtcgaacaaatggagctgccgccagaatggctgccagctttattgacgcgctgtgaggaaaaagggctgatgtttttaagcacagtgtgtgacgaagaatctgcggatctattgaatcaaaccgatccgccggctttcaaactggcatcctatgaaatcaatcatttgcctcttttgcgtcacacggcttcttttcaaaagcccatcattttttcaacagccggagccactattgcagatgttcatgaagcatatgaggcaattacaagcgagcaaaaccatcaagtcgctattatgcattgcgtagcaaagtatccagcacctagagcttacacgaatctacgtgtgcttcaaactttagcctcggcttttcctgaggcagtcattggcttttctgatcatagtgagcatccaactgaagcccctgttgccgctgtgaagcttggggcagccatgattgaaaagcatttcacggtagataagacgctgcctggggccgatcattcctttgcacttgatccagaggaattaaaggaaatggttcagcatattcgagcggcggaaaaggaccgaaatcaatcagaagaagacgctcatcctctgtcagaggagattcttggcagttcttataaaacgacaacagccattgaagggcagattcgtaaatttgcgtatcgagggatttttacaacaaaaggtattgcaaagggcgagactttgacagcacaaaacctagccgtattacgtccaggacaaaaaagccaaggtctgcatccgcggtatatggagattttacttggcgccaaggctgtgagagacatcccagcccatacaggcgtttcgtggaaagatgtgctcatgcaggagtccgagcatgatcaatgatgtgctctttgtcatacaagctagaatgggctcaacaagactgccaaaaaaggtgatgaaaccgatcggcggtatggcactgatcgatttcattgttgaacgggtaaagcaatcagatcattacaatcacaaaacccagaacctcatgattgccacaacagtcgaggcagaggatgatctgttggctcaatattgtttatcaaagggctataaggtatttcgaggtagtgagatagatgtactgcagcgatttgcgcagattgtccgtcattttgaaccgcaaaccattgtccgtttaacgggagataatccatttatagattcaacgcttttgtcgaaaatggttgaagaacatagacagaagaaggctgattacacgtatacgactggaacgccactcggtatttccggggaaatgatcgacgcatcaattttacgtgaaatcgacaattttccccttacgcagccggagcgtgagcatgtgacgctgtatatccgaaagcatcctgagcgatttcaactgcaattattcacaccgcccaaagaactcgcatatcctgcttatcgattcacgattgatacagaagaagattatgtatttgccacccgtttacttgagaaagctggtggatctattgctgtgcctacggctgagcttatctccatttgtgaacaagatcctgatattgttcggttgaatcaatttgtgagacagaaggatgctgaatgaataaaaaaatcatgattgttgtgtacggtggttttttaagagggatggggcatgtcgccagaatgagacggctggcaaaagaattgtttcaagaaggaaacgacttatatttctatacaaatgaacagatttgtgtagaaatgctctcgcatccagcttggcacgttcatttagtgcaggaaccaaacgtattccttcaaatggagcaggacataaaagagctgaatcctgatcttctgctgattgatgtgcttgattgtgacctccagtttcttcgatcgatcaaagcgtcctccgcctctgcaaggctggtcttatttgaagaagaaagagcagaagcctgccagcttgctgatgctgtcgtgaacggcatttatggtggtctggacgaaaagcgtctgcaagtaaatggaacggactatttttatggaacaccttatttattgttagatcacgagatcagcagattaaaagacacatatgaggttcgaaaagaatgcaaaaaggtggttatcagccttggaggcagtgatccaggcggattgttatcaaaggctgtatcagcactcttcgaagctggccatttacacattctagcggttacaggaaaagcctctcgcatcgaagaacaaatcgaggctgcgcatattcaattcattcgccatacggatcaattacctgcccgtcttgcagaagccgatctggcgattgttgctggcgggatgacgttatatgaggcagtttgtatcggggtgcccagcattgtcctttcgcaagtagaccaccaaacagtgacagccgctcgttttgcgcaaaagggagcctgccaccatcttggattaggtgaccttgtggatgaaaaggatatatggcgtgctgttgaaagactatccgccagttactttctccgcaggagcattcatctcaatggacggtcactcattgatggaaaaggaaccgaacgagtgaaaaacattcttatacacctcatgaatcatcaccaaaaagaacataaggatgtgtagatgtgaagggagttattttagcaggaggaaagggatcacgactggcacctttaacgaagattttcaataaacatttattgccggttggtccatatccaatgatttattggtctttgttcaaactgaaagaagcagggattttagatgtgatgatcatatcacaagaagaacaaatcccgctgtttcaaaagctacttgaaggcgatcaggaattcgggatgaacattgtctatcaggtacagcctgaagcttctggaatttcggacggtttatcctatgcaaagccctttgtagaagaggagaaatttgtgctgatgctaggtgataatgtatttgaggattcgctaagcccttttgttgaagcctttcagcagcaagaaagcggagcgaaggttctgttgaaagaagtggcagatccaaagcggtttggcattgcagaaattgatgccgctcaccaccggatattatcaattgaggaaaaaccggagcatccgcgttcatcttactgcgtcacaggcatctatttttatgatcaagaagtctttcaatatatagagaaaatctcgccgtcagatcgaggcgaattagagattacagatgtaaacaatctctatatctcaaatagccagctgacctatgatatgttaaaagggtggtggattgatgcaggaacacatgaatctctccaccaagcatctacgaaaatgtttgaaacgatgaagaaaaaagagggatacgaatgacgaagtcttatttaattacaggcggagcgggatttattggactaaattttgtgaagctgctgcttcaggaaaccgatgtccggctcactgtttttgacaagttaacatatgccagtcatccagaggagatggatgaattattaaagctgtctcattttcgttttattcaaggggatatcacccttcagcatgagttggatcaagcatttgatgaagtctatgatgccatcattcattttgcagcggaatcccatgttgatcgcagtattgaatcggctgagccctttattcaaaccaatgtgctcggcacctatcgtatgctggaggcagtcttaaaaggaaaggcgaaaaaactcattcatatttcaacagacgaagtatatggagatttggagctggatgatcctgctttcacagaactaacaccactttcaccgaataatccttattcagcaagcaaggcgagttcagacctgcttgtgaaatcttatatccacactcaccaattacccgcgatgatcacacgatgcagcaacaactacggaccgtatcagcatgaagaaaaattaataccgactattattagaaaagcgatcaatggtgaaaacatcccgatttatggagacggccagcagattcgcgattggctgtatgtagaggatcatgcgagagctgtaaagcaggtccttgaaagcggaacagctgggcaggtgtacaatattggcggcggcaacgagaaaacgaatctcgatttgaccaagaccattctgacgcagctcgggatcagtcatgaccgtattgcgtttgttcaagatcgaaaagggcatgacagacggtatgccattgatgccagtaagctaaaatgggagctcggctggacgcaggagacgtcatttgaagcaggtattgaaaaaacgatcaattggtattgtgccaaatttgatcagggcgaagaagggtgacggatgaaagttttaatcaccggtgcaggcgggcaactagggaaagaattgagcagacagctcaaggaaaaagatatcaccgtcattgccttaacgaggagtatgctcaatatcgcagaccagcaagcagtcagacacgcaatgagacactttcagcctgatattgttgtcagtgcagcagcatatacatctgttgatcaatgtgaaacagaaacggaaaaggcgtatcttgtcaatggcattggcgcctattatacagcgctggaggcaaagaacgtgggggctgatgtgttacatgtcagtacagattatgtatttgacgggcaagcagacagcccttaccaagtcgatgcacaagcagatcctcaaaccatttatggaaaaagtaaaaagcttggtgaggaattgattcatctcgtgtcagacgaagtgaaaatcatccgtacatcgtggctatacggacatgagggacataactttgtgaataccattcttaggctcgcagaaacaaaggatcatttgcgcatcgtgaacgatcaagtaggatcacctacttatacaaaggatgtcgcagaggcaatcattcatttgtttgatcagaaggcagggatttaccatgtcagtaaccgagacagctgttcctggtttgactttgcgtcagaaattgtcgcaaaaagcggcctgtctacgaccattgagccaatttccacggaagagtacggcttccaaacgcctcgtccagcctattctgtgttagaccttcaagcgattgaagccacaggctggcaaccaagacattggaaggatgcacttcacgaatatttgcagaaagaagggagatggcatcagcatgattgatggtgtacaaacgaaaaaactcatgaaacattgtgatgatcgcggcttttttgcagagctcattcgagatgatgagccgatgctgaaacgctttgggcaggcatcgtggtcgaaaagctttccaggagtgatcaaagcctttcattatcatgaaaagcaagacgatgtttggtttttcccagcaggtcatgcccaggtcgttttatacgatttgcgtgaggattctcctacaaagggtcaaaccgacgtgtattatatgggggaagacaatccaatgctgctcctcatcccaaagggtgtcgcacatggataccgagtactaggcgagacgccgctgcaaattgtctatttcacgacagaatcttatgacccgaaaaacccagatgaaaagagaatcgcttggaatgacgagacgatcggatttgattgggaaacgacatttaaataaagaacagaggcctttcgcaggagaaaggtctttttttgttgaaatacattctatatgtgtcattttatgtatttttactaagttgagtagaaaagggatgtggatgagtttgtctaaaagaattgcatttgtcacaggggcaagtacagggattggaaaggcaattgctataaagcttgccgcccaagaacatgtaaaagtcatcatcaattctagaaatcaatcctcactagaagatgcgcagcagcacattgggcgtatggcagaaacaaaagagccggtgtctcttttctgtggcgatatgtcgcatgaaggagtgcgagcggaggcctttgcggcaatagaaaaagagtttggcagactggatgtgttgattaataacattccaggagggaagccagatacttttgattcatgtgaaagtgagcagatgctcgcagcattttctcagaaagccattgcgtacattgatacgatgaaacgtgcggcagcgatgatgaaaagacatgaatacggccggatcattcaaattgtcgggaacctctggaaggaacctggtgaccaaatgtttacgaacagtatgatgaatgcagcgattatcaatgctagtaaaaatgcagccacacagcttgcgccctcaggaatcacagtaaattgtttaaacccaggatttattgctacagatcggtatgaacaatttatcggaaacatgatgcgtcaacagggattatcacgggaagaagctgtacaggctgttgcgtcagaaatcccgatgcaaagagtaggttcagcgagtgaaatggcttcattggccgcttttatcgcatcagaggaagcctcctatgtcaccggacagcaaatatccgtcgatggtggttcaatgaaaagtatataacatgaaaacccgctatatgcgggttttttgatgaaagcgaatcggcagtatatggagccgatcgataaaaagggaaagctgttcaattggcgccaccattgagatgcggacatgacgtcttccatgtgctccaaatacacccccaggcgtcacgacgacatctgcatgctcgagtaaatagtcggcaaaagcatgagaatcctcgaaatcatcagggatcgaagcccataaataaaaggcgccggctggacgttcaatggtccagccaagctgcttctccgcttgacggatgaagaaattcattcgttcaaggtagacttctttcaaggattgaatatgacagtcatcactttgtaaggcaatggtggcggcttgttgaaatccgccatacatactgacaaacacatgatcttggaaggcgtttatggcatgaatgatgtcctcattccctacagcaaaagcgactctccatcctgccatattgaatgttttggataaagaatataattccacgcctactttttttccaagaggtgcctttagaaagcttactggtttttgctcataatgaaatgaaccataggcaaaatcatgaatcacatgcagaccgtgagctgaggcaaattccgcagcctcttcaaaaaatgcttcacttgccacagcacctgtagggttattcggataatttaagaaaagaacctttgccttttttaacacgtctggatcaattgacgggaaattcggcaaatagccattttcctcttccagtcggatgcagtatggctttgcgtccgccatcaagatgcctgaatgatattctgggtatccaggatcggggacgagggcaatgtcccctggatcaagcaggcactgactcatcacataaaggcctgttttccctccattgaaaagggcaatctccttctgcgggtcaacctcaatgccgaattcctttctgtagaaatctgcaatggcttgcttgaaaaagtcaaagcctctaaaaggagcatattgctgaaattgcaaagtgcctgctgcctcttgaagggcactcacaatatgggcaggagtaggaagatcgggatttccctgaccaaggttcacaatgttcgctccgttttgtgttttatgtgcaattttctcaaatacggttccaaatttttgttctggcagccgttcaatcatgttagatggtaagatcttcaccacgttaccctctctttctatcccttcactagttcatccattaactgaatggttgcctgcttctgaatgttacggatggatgcggcaacatcctgagaagacgacccttttaattcaagagacacgatgccattaaatgcttcgaataaagatagatccacaaaggttcctttaggtgggacggattcactgatgatgacagtatctccaactaaagtgtcctgcggaatatgaacatgatcaatggtgatatgtgtgacctcaggcggaatgtgtccgctctctttgaaatgctgagggtataaatgacagtctgctaaataatgcgtatgtccagaaagcagttcttttggcaaatcagccttttttccatcgactaatacatcaatcaacagcttggccatatctaccccaaagacctttttgatattcggaatcatattccagccagcaaatctagctgctgattcgattaatccggtttctcgatttttcatgagcttgatttctgtatgagtggcacagttttcaagacctagcccttcatttgccttctttgctgcctcaatgatgagttgctgggcttcattgtctaggatcgacggagtaatatgagccgtttctgtaaaaccgatttgaggggtcttatcatgaatgacaaaagggatatattcaccctcaacgactaacccttcaacactgacataatcagcgtagccgtcctcttgataccaatcctcgtaagcaccctctaagtatgtttcagcgacaaacggagcttcatacgtcacagcgtttggaacgggaatggtttgcaaataggattgtacgtttaaaaagagatcatcactgccggctcggtcatgaaaaagggtcacgccaatggagcttgctaaatatgtaggctttaaaataagcggtgtcccgatatgttcaatggcttgctggaaatcagctaaagtagtgacaggcagagtttttactgctttgaccccagccgcgttgaatgcagccctcatttgacttttatcacgcgctaattcagctgcctttaccccagcgccgcgcagtccaagacgctcagcagcttttgccattggtgcaatgaataattcattattggtggtgatcgcatccgctttgaaaaaggaagccacacgaactaggtcgtccaccacctcttcctcggatttcagataatcgtcatgtgcccagtaaatagaatctgggtgttcaaaagaagggtttgtgtcaaaataatctcgatctttgatgacggcaatggagtatttttcgattagctcagcgtgtccctttgtaatagcaaagggtctcgggatataagaaacgatatgatacgatgcagccacgctttcgtaaaacatatggggcgggcatcctcccagatcagcaatgacaagtacggtttttttactcaatgaaagcactcctttttatctagcggtgtaaccgccatctgctgtgacaacacttccagtcatataactggatagatcagaggcgagaaacagcatgacgcccgcaatttcttcgggttttccgagacgaagtaatgggttcacctttgctttttcttttttgacaacctcaagactttctgaatgattgtctaaaaaggatttttcatttaatggcgtatcaataatgcccggggcgatacagttcaccctgatttgatgggcggcatagtcgaccgccatggatttggttagctggatgacaccgccctttgttgcgttatatgcagggatgtcaggccagccgacaagacccccgacagatcctgtattgataatacttccgcttttcttttcaagcatatgcggcaatgcatgcttactcataagaaatacacccgtcaggttgacctgtacaatgtggttccaatcctccagcgtcatctcgtgaacgggggagacaatttcgatgcctgcattgttaatcaaaacatcaattgttccaaaacggttcagcacgaactgaacggttttttgacagtcagactcattcgtaatatctgttttgaaaaacgcaagatgctcgtgcggcaatgattcgacgagttgtttgccgctctgttcattgatatcagccactgctacttttgctccatgctcaaggaaaagcttgactgcggcaagcccaatccctgatgcacctcctgtaatcaggacgacttttccgtcgaggttcatttcttcaccttagacgcttttggcttcaaccgattatagcggggagggaagaagagattaatagactttgatgcttccggctttggatttatcgcaccatgatcttcctttggatcacagaaataagtggtgccaaattccattttctctgtaaagccttcaatggtcatatcataacctccgctgatgcaaatgccgatttgttcattgcggtgtttatgaaaaggcatttcaccgccatttccaggaatgttggcaatcatgagctccatccaatcctcaacaaaaaaggtgacttccatgccagggagtaaatcccgtgttttgaaaatatctaagaaataagtaggaggagccgtatattcctcgccatcttttaatctcttaatatcaatggcgatcgcttcctcatctgtcaggttagatgcgccgtgagggacaaaaggtggtgcgatataggctgattctaaaggggtgagcaattgggtcgatgggccgaccgtcatttgaagctcgccttttaatacgatgccgatttgtgcttcgggatgctcgtgaggttctatgatcgtgtgaggagggacgtatgaaattaacacttccgtatcacctctgaccgtggaatattgtgtgacaccattctcccattctacttttttggcttgaggaaaatatcgttcttgcgtcttttgttcagtttgcatattatatctctccttttccgaatatggaccagctcattgggatgcttttaaacgttcgaatgaaggtgaggccgtatgtggctctggctacctcattagttaaagcgaaatcaaattcgccgtctcttactttttttgcggcagtacttgtagaattgactagctcaaattcagcattttggtgaatgaaatattgaatcaaattgacaggtgcagggtgagagacaatttttaaatggtggagcatttgttcttgaaatgggaaatctggtctgacagccaaaccatacatgggtgtgtcacatctgaaaatttgtaaaagctgcaggtcaggtctcatgtagaagtgtttgattccttcgtatgcgtgtggaacgagagtgtattggagtgcgttagagagagtatgttcaatgcaagtttcgaacgtgtcgtaaagggatagtttcgtatgagtgccgagtgtagtggtggaatgagagatgaaatgttttgctgcatattcactgcttgtcccctcagggcctagtgtattgactgtaaacatcttaggtgaaacgatgggctcttctttgaaatgaaaaacatcattctttaagatcatgtttaccatccaatctttttcaaatttttactagattataaaaaataaaattggcaattgtcaacaaaatttataaaaaatgtattttataatgatattaaaaattgatctaaaaaaactgcacatacctagatgtgcagtgaattgagcttacgtttcaaatgtgtttttatgtttctgctgtaaggttcgttcacgtttatagctgacgaagctaataagaaaaccaacaagcgtaacgagtgcacatacaagccctaccgtatgatagccgaaatggacatagacaggtcccataagtgcggaaccaagcataacggcaaggttggacgcaagactgtaaaaagccatcactttgcctcggtgggtttgggagcagtcacttagaacagtgctcaaaagcgtgacggataaactttgcatggcaccccaaataaatagggcaaaaatcagcaatgtccatgagaaaggagcataaggaagtaaggcgagaacgagcgtaatgccgcccagcacaaagaaaagagaacgagttttgccaaaccagtctgctaatttccctgtaaatacactcatggaaaaaccgacgccgtaagccatgatcagaagtcctgccgtcgattgccctccagaaaacaaactttgcaaatacgctcctaaaaacgagtacatgccataaaatccaagcatattacaaaatgtcacggtcaaataggcggggacacgatcaattttcaaagcgccccatatagagccagctttctccctagcttgaggtgctcctgtattcgctgtggcggtttgtttacgagattcaaggatgacgagcagcaggacaacgagactcatgatggcgaagatccaaaatgtccagcgccagttcaaactctgaccgataaaggcgccaattggtacaccaaggacaagagaaagagaccagctcgacacaatgagtcccatcaccttgcctcgatattcgtaaggaacccggtcgcctacaagagcataggctgttggcacaaatacaccggtcgccagcccagaaatggcacggccagcaaaaaacactgccaaattcggggcagccgcacacatcacggttccaatcaaaaagaaagaaagcccgatgatcaaacacagttcccttgaataccggtcccctaaaggaacgagcagcggggctccaaccagcacagctaacccataaatgctgatggaaagggcgagaatatcaagagagtgctgaaaggagtttgataaatcaggcagcagtggtgaaatcaccagttcttccgatcccgccgcaaagacgccaagtgtgagcgcgatggcaagtgtgatgggaaacgttttagaagccttgctgtctaaagattctttcatcaggtgatccctccatacttgctttttcattcaattccgttaaaataaattctaccattatttagttttattttacatttcgaatcataagtattatcataaaatacttttcaaatggaacgactttcggataggagaggtacgaatgaaaatcaccgatgttgatgtgcatattttaaatgaattgaaagaagatgcccgcttgtctatgagggaattgtccaaacgagtcaacttatccgcacctgcggtagcagaaagagtacgtaaattagaggatgcaggaattattgaagggtattcggttcaggttaactataaaaaattagggcttatgattgactgcctgctggaagtcacagtgctaaacggggagtatcaacgttttgtggcttttatgaatcagcacccacgcgctttttttgcttatcgagtggcaggacagtcatgctttttcattaagctgtcagtcgcttctcttgaagaaattgaagcctttattcaggcagtgtctgggtttacaaaaaccgtatctcatatcgtcttatccgagcactccttttcccatccagttcaggaacgtgtgaaacaaatagaagagccagaaatgaccgtgatgaaataaaaaaggacctgactcaggtcctttttgttcgtctatctgactgatagctcataatcgtaatgatgagcccaatgaaggttacagctgcagcaaataacggaacaagctgtaaatgtgtcagttcgatggcgagaccgccaagcgctgcaccgccagcattcccaatattaaaggcagaatgactaagcgtcgatgcgagtgtcggtgcttcatgtgccatgttcatcgtgcggtattgcaaggtaggaacaagaataaatgaaatgattccccaaacaaaaatggtcagcacagcaggtactttgaattcggaagtgattgtaaacaataacaggacagccatcagcaggatcagtgtcaccataatactcggcatcagcttccaatcggcaagctttccgccaactaaattcccgatggtcaccccaagcccgaagagaacaaggatgagcgtcaccccattttcctgaaaaccagtcacttgcagcaggatcgggctgatatacgtaaaggcggtaaacacacctgcaaaaccaaagatcgtcattgcaaaagaaacgagtacctgtggctttttcaaaacagacacttcatttcgaatatccagtacttcatccttcgattgattgggtactaagctgatgataccgattaaggaaatgagcccaatgacggcaataacaagaaacgacatacgccagccgaattgatttccgatgaaggtaccaaacggcacacccagtacattggcgaccgtcagtcctgtaaacatgaagctgatcgcacttgcacttttctccttaggcacaagccgcgcagccattatggctccgacgccaaagaaggttccatgagcaaatgacgtcaaaatacgtgcggccattaatagaccgtaagtggtcgatacagcggcaacagcatttcccgccacgaacaggatcattaatagaatgagaagacgtttcctcgacattttcccagttgataatgttaaaataggtccgccaactgcgacaccaagtgcatatccagtaatcagctgccctgaagcagagatggatacatgaaggtcgtttgcgacgtttggcaaaagtcccataatgacaaattcagtcatgccaatcgaaaacgcaccgagcgttaaagcaaaaatagcgatggggaagtttttcatgatgtgatcacctttctaaacaaatacataaaaaagcttcggaaagttccgaagccttaagagtttatcatacatggaaataagacgccagctgctcgtttgctaatcggtttccgacaaagaaggaaccaaattcgccgtagcgtgcactgacttcatcaaagcgcatttcataaaccaattttttaaattgaagcacatcgtcagcgaaaagagtgacgccccactcataatcatcaaaaccgacggagcctgtaatgatctgctttactttcccagcataactgcggccaattaagccgtggcttctcatgagtgatttacgctcatccatggagagcatgtaccagttgtcattgccagaacgtcttttatccattggatagaagcacacgtattgagaagaagggagctctgggtatagacgcgcacgtacatgcgggttctcgtaaggatctccgccatctccgcctccagctaagtagttgctgagttccacaactgaaacgtacgaataagctgggattgtaaactctgctagtcgtgttttattgaattcaagttcaatttcacccagttcttccatggttggacgcaaaatcatgagcataatatctgctttttggccgacaatactatagattgtttggcttccagccttatcgtgctcagctgttttccatttttctaatagacctgtgaactcatgaagaatcgcttggcgctcatcacttgtcagcagcttccaagctgtccagtcaaaggttctaaaatcatgcagtgcataccagccgtctagtgtttgagctgcttcattggttgtatgttgttcgctcatttatttcactcctatttacagttttccatctgttccaactataacatagtttgtccaagtgaagatgtgatcaaaacttgaacgacgaaaacagcttttatggaaattgattaaattagtttgaaaaataagaatttaatttgtaagcgctataatgtaagttggtagtttgaatttatgtagaagaagagtatgcttaaaagagaacgctttttttgtaaaatcaaggagggtatataagtggcagatattttttcaacagttcaggaaaaggttgcaggtaaaggagtaaagatcgtttttcctgagggaatggacgaacgcattctaacagccgttcaaaaactagcagatggcaaagtattgcagccaattgttgtaggtaaaaaacaagaagttgaagcaaaagcaaaagaattaggtcttacacttgatggtgtcgacgtgtatgatcctcatacatatgaaggttttgaagagcttgtacaagctttcgtagaaagacgtaaaggcaaagcaacagaagagcaggcaagaaaagcattactagatgaaaactacttcggtacaatgcttgtatataaaggtcttgcagacggacttgtgagcggtgcagcacactcaactgctgacacagtgcgcccagcacttcaaatcattaaaacaaaagaaggcgtaaagaaaacatctggcgtcttcatcatggctcgcggcgaagagcaatatgtgtttgctgattgtgcgatcaacattgcaccagacagccaagatctagctgaaattgcgatcgaaagtgcaaacacagccaaaatgttcgacatcgaaccacgtgtggcaatgcttagcttctctacaaaaggctcagcaaaatcagacgaaacagaaaaagtatctgaagcagttcgtattgcaaaagaaaaggcacctgagcttgtacttgatggagaattccaattcgatgcagctttcgttccttcagtagcagcgaaaaaagcgccagattccgtcatcaaaggcgatgcgagcgtatttgttttccctagcctagaagctggaaacatcggctacaaaattgcacagcgcttaggtaactttgaagctgtaggtccaatcctgcaaggcttaaaccagccagtaaacgatctttcaagaggctgtaatgccgaagacgtttacaaccttgcgctcatcacagcagctcaagcacgataatagtaacgatcaaaaaagctagtttcgttttcacacgaagctagctttttttgcgcgtgtgatacctacgattcatttttcgttgaattcgttttcaatcatatgcctcttgtgctaggaaatggtaacataacggaggactatttgaggaatagaggtgtttgacgatgtctggagctatcatcggttatacaacagccttgtattcgttaaaggcagacatatccataaaaaaagaacaaatcatcgaactgagcatatgtcgaaaagaagtgaaagaggcaaaaatggccttgtcagatgcgagcaagaacatcacgcgtccagaccttacttcacatacatggtttggccacttggcagatacgtttgatagccttagggaagagatgaaatcggttagtcaagagataaaggatgcacagctcaccaatctattgaatcgaattgatgaaaaaatcaatgacttgacagcaggtatccattcattagaacgtgatattcatacagttgaaagaaagatagaaaaagagaagcaaaaacaactggaagaaaaacgaggaaaataaaatgagcaaagaaattaaaatagatgccagtgaggcgaaaaaagcattaaaaaatgtaaaacaagcaggcgctcatgtccattcaacacttccaaaaaccatcaaagggaaaaatgagctctccaccacagaacagatagaaaagatcaaccagcaattgaatgaactaagtacatcctatatagagatacttcagaaacagcttgtacaaacagaacaagccgtgagcaccatgattgaaacggacaaatcgcttgcttctagtcataaaagaaaataaaggagaacggaatgaaaacccttgacgcctttgcgctaatcaatggaattgaccaaacactgaattcgttaaagcagcaatcacaaaacatcagctcactagaaaaacaaatcgaccacatcatctcacttgatgatgcactaaagggagaggcagggcaagccattcgagcattttatacagaatgccatattcctttcttgcaattctttcaggttgtcattgaggaatacagttctgcgctgaaaaacacaaaacaggcgcttcatgctcttgaatcaaatcagcacggcttgatctcacaatcatttattgaacacgaactagatcaaggactaaaaaaagcagagcgcacgatatccgagattgtaacagatgtaaaccatgccatcggtagcattggtcatattgttcatttgccaaatgtagacgaatcagcttttcagcaaaactatcaaaaggcatggctcgagacctcaagaaccattggtctgcttcatgcatttgacagagagcagacaagtgctttacatgaaaccaaaagcgcccttcaaacaatgaagcaatatatcaacacgttaagcaccatgttcaccggcccaaaaatcgacatcaccacctatcaaaaagggtctattttcaaaaatggaaaagaagaaaaaataagcagcaccatcagtggattgaatgacaaaatagataacccgaaagacaatccaatgacgctcatgctgaagaaactgagtgagaaagaacgggcgaatgtggagacggttgtccacgaaaagccgtctagtaaaatcaatcaaacgaccgtgaccttaaatggaaaagtatatcatataaatgagtacaaaaagatcaacttcgaaaatgccaaaacggttgaggtcatgcgagacggaatgctgtatcggttacgaatatctgaaaagaacaaagtaacaattgagagcgttaaaccgatgtcagatgtaaaaacaggcgatcaaccccaaaacatcttaaatacagcggttgaatttacaggaataaacgacgccattcgagcgattacaggaagagatcctgtaacaggtgataaagtcgctgatatggatcgtttagtatccggggtgtacatggttccaagtaccaacattgttaaagtggggaaatatgtttttaaaattattaaaggggagaaggtagctaagagggttgagaagagtgctggaagtgcgaggaatggggctaaagattttgaaaagtcgttagtgaaattgcctccagcagagcgcgttgcagctgtaaaaataaaagtacaagaagttgctaaaagtaatggtttaataaaagattcaaaattaagtaagattaatagtagggatgtatataaagaccctaaaactggagatttatattcagtagatacgcagcatggtcgttttgaaaaaacaaataacaaggggaagcatcaaggagaagttgattttgatttcaaacaaactaaacctgctgatgcatctggtggtcataatttaaaaattaagtagagaggatgtaatagaaatgattgggaatgattggatatctgttcgtgaaattgaagacgatactcgaatttgggctggaactataatcagagtttttaaggaggaaataaataaggacaacatagaagataatttctatgattacatcgtttcttttatttatgataacaatgaatatttacaattaacctgcctaactcaaggggagggtggaaatattgtttgtatattgcaaacagaaccaaattctaattattcattaggtaaggaattgaaaagaatgatggatgatggttcaaactctgtttttgtgaaattttcacctgaatgtatcgttaaataaacctctaatatgagttggacagaccagattcttttcaaaataaatgagaataaatgagaataagtgatagaaaaggtgagtttacagagatgtcgctcatcttttttctatctaagttagatttatgatggcacaatacaaatcgataaagtgattggatattttgaaggaactgatacagaaaaaatcaaatccgcagctgcggaaacgccaaacgcatattagacggtgaagtcgtctcaaccaccgaaaacatcatcctagaatacagcggcatctacgatggctatcgagccgtcacaggcaaagaccccgaaaccagccaaaacatcagcagcacagacaaagctctgtccgcagcttctattatcccaatcacgaaaatagtgaaggttgggaaatatgtttttaagatggatcaagggaagaatgtggtaaagagggttgagaagactgctaaaggtgcgggtgaacttaataaggatttagcaaaagcttatcttagggatatagaggctaaaactggacgtaaggttaataaagatcaaattcatcttattaaagaagccttaagaaacaaaaactatgaaaaattgacaccaaaagagactgctaagcatagaagcaaatttacatcgagcttgaaagataaattaattgcagagtgggaagaaaaaaccaaacaaaagtggccaagatatacagaagaagtacttgataagaatggagaggttgctcggagggttggtcaaccgtatgatgctcatcatatcatagagaacaactttggtggcgcccatgagtggtggaatattcatccggctaaatatcctaacgaacatcaatcagggatacatggaaagggagctccatcaggtaaactatttccaaggaggtaaaatagcatatggctaattttaaatttattaatgaactagaaaataaaacttataaggtatctgaagatgacattttaaaagctgaacaaagaatggacataagttttccaaatgatttaagacaattatatttagaaattggctatggttttattaaaggtcaaagtgctaacttaataaatagaattatgggaccagggacagtagcagatattagattaagagaaggtgtttttgaatttgatccagatttagatggactttttgatgatgaaaataaacttattttttttgaagtaaacgaaggtgtttatatttcattagatttaaaattagttaataatccagtatattattttgatactcaaatagctgaatcgttagaggattttttcaaaaagtttctcaataataatgaatattatctagatttaattgaggattagacttaatcggaataaatagtgaaaatcaattgaccttgaatggctatgacttgcttttcaaggttttttactttattttaatcaactactttacgcgaataatatcactttgcatggcaataaataaagaactgttgtcatagatagaactgctgtctattgttctagaaaaaggtaaattaggtctgatatttagaggaataaggaaatatcaagttttgtagtaggtagtaaaacagggaaaggaatgcatatggaacataaacaacacaaaaacaaaaaaacatttaactggctattaagtatcagttttcttcttgtcattgggacagctttgatgataggagtttcattctcagatgccgaatatcgaggtttccccattgattggctagttctacactcacatcatgcctttgaatttctgtggttaggttttatactcgatgtggctattttctatttcatattaaagttgctccttcggatgtataaaagtgtcatgaaaaaattagctgcttaaaatataggaggctttcaaaaatgatcaatctatttcaaatccaaaatctgaacatgaaagagccagcaagtgagatacatatcaaagaggcagaagctgaactaaatttgattttcccctatgtctataagaccttactaaaacaatcaaatggatgttccataggcggcaacctgctactatacggcactgaggacattgcggaacgcaatgcaacgtgggaagtctatcagtatgcaagcagctatgtagcaattggcaacgatggcggcgggcaagtatttcttatgcgaggaagaagaggagaaaacagtgtggattgtcgatgctggtgtgatagaccctcagcatgcggaattggtggctgaagacttgttgagttgggtcagtgagggctgttacatagaagtttagtctattaaggagatgatcgatttgccgtggaacacattgatcgctgcatgcctcgtggttgggattcctgtcgttttgattgcagctgtttatttcatcgaaaaaaggaagaacaagaaaaccaaagcatccagttgaaaaactctgtgacgttccttgtcatagagcttttttctctctcattctcccccatgttataataaacacagtttatgaacgagaggatatgcaggacatgaaaaatgaacctattgagttactgacacagccgaaatggcgaatcatagatcaatcgagcctcggtctttatgtggacccgaagcaatcctttgcgatggatgatacgctttgtgcgtcggttgggaagggtctctcaccagcgacagcgcgttcttgggtacatcacaatacgattgtgcttgggattcaggatacaagacttccatttctgcaagatggcgtgaaactgcttgaggaagagggctatcgcgtcattgtacgcaattcaggcggccttgctgtggtgctggatgaaggtgtcttgaatgtgtcattaatctttgcagaacaaaagaagggcattgatattgaccgcgggtatgatgcgatggtggaattggtccgccggatgctgtcgatgtatgaagtggacattgaagcctatgaaattgtcggctcttattgtccgggcagttatgatctaagcatcaatggaaagaaatttgcaggcatttctcagcgtagattacgcggtggagtcgctgtgcaaatttatttgtgtgcagatggaagcgggcgggaacgtgccgacttgatccgccgtttttatgacgccgccttaaaagacaaacgagaagaagtgaaggccgtgtttcctgatatacagcctgatacgatggcgtctttatcagaattaatcggtgaacctatcgattgtacgcttcttatgcgtcttttgctagaagagcttcaaaagctcagtgatcagctgacagcgtcaggactgaacgcagaagaacagctggaatttgagaaaaacatgacgcggatgattgagcggaatgaaaaggtgttttcgtaaaaagaaaggaagggttctggtgaaatccaaaaacggcggttacctctatttactatggcttcctgtcatcatgggagccggctacggcatttcgcttttggtgccgtttcttcagcctgtactgacacttggcatcgcaggtctttatctttttatatttggtgattttcaggtgagacaagtcaggtatatttttatgttcgtctttttaattaatgtcctttttagtgtgatgttatttttgggtatttaaaaagtgcttcccgcagatggggagcacttttggttattctgccattttttcgaggttgccgttccggtccattttaaaggttggagcggcagtgtcgtcctcttcaaacaaaactagttttcttgcacggttcatgattttgacaagtgtttcataatcttcttgaatggtgagctgatccttttcaagctttttcacttccgcttctagctgtgtgactttatgtgaaagttcgttgttttctcgttttaaccggctgttttccatgcgtaaggcagatgattgctggccatcgccttcatagcggcgcaagaaatcaatgacatcttcgatggttaaatcctgttgctgcctaaaaggattggcttctggctttttctctacgacatgagaagcttgtgacaataaatgtgataaactagctaactcttcattgtagctttgatccacaaactgaagctgctcggctgtttcagatgctggtgcaaacgtttcttcctgcgctggttccagctcctgtgagaattcctcttgcgtgactgtttcttctacttgcggctgataaagtaatcgtttctttgcaggctggccattgccaagtgcacgcatccgttgttttcgctgttttttggcaagagctaacgctttttcatattgatgcctcacaacagcattccatctaaaaccgcatgccgctgaggtacggttcagcttgtctcctacttcttcaaacgcattcagctgtgtactgccctctctgacgtgacgtaagacggtttctgccaagaggagatcatcttcctctgaccaagcatcttgtctttgttttgacatgtttaaacccccatatgatttgatggtattagattagccaagttcaagaaagtttatacaagtttgctaaaaggatagtggaaaatactagcttttatgtaagcacgtatcggcggttacaatgcgtcttgcaagtccagccgcttcgatgtacaatgttgggtggtatattatgactcttggttttccaactgtttcatatagaatgaagttcatcattgaaaggaagcgtaagaccatggctaatgagtttcgcgtatgtgacgattgtgatgcgacgaacctaaagacgttgctgcctcgactcaaatcggttgaccctgatgcaaaaattgagattggctgtcaatcctattgtggtccaggacgaaaaaaggcttttgcgtttgtaaacaatcgcccattatccgcaccaacagaagatgagttactcgaaaaggttcaaaaaaaagttaaataaatgtcactgaatgtgttcagtcgacctaaaaagaggtccgtccctgtcaggtcgggctttttacgtccgtgcaatctttgagaacacattcaccagcaaattcaaggatgttttcggggaaagttacccgatataatagaaacacgtcttaaaaaaagagggacgaaacgatggcgtatccaaaagggaaattatctgaggaaaaggtatttaaagatcctgtgcaccgttatgttcacgtacgggacgcattaatatgggatttaataggaacaagagaatttcagcgcctgcgacgaattaaacagctaggaaccacttacttgacgtttcatggtgcagaacacagccgtttcaatcattcactcggtgtatacgagattgtgagacggattgtggatgatgtattcaaaggtcggccggaatgggatgagggagaacgcgagcttgtactgagtgcagccttgcttcatgacctcggacatggtccattttctcattcctttgaaaaggtcttccacttagaccatgaatcgtttacaagagatattattttagggcaaaccgaagtcaatgaagtgcttcgccgggttagtgatgatttcccgaagcatgtggcagaagtgattgccaaaacgtatcaaaacaaacaggtggtcagtttgatctcaagtcaaattgatgccgaccgtatggactatttgcagcgtgatgcctactatacaggcgtcagctacggccattttgatatggaacgtattttgcgcgtgatgcgtccgagagaagatcagattgtgatgaagcagagcgggatgcatgcggtcgaggattatattatgagccgctatcaaatgtactggcaagtttatttccacccagtgacacgcagtgcggaagtcattttaacgaaaattctccatcgtgcaaaagagctgcatgaaacgggctatattttcacacatgcccctgttcatttttattcgatctttgaggggaatgtcaccacagaggactatattaagctggatgaatccattgtcttattttattttcaggcgtgggaagacgaagaagatcacgtgctggctgatttgtgccgccgttttatgaaccgccgattgttccaatatacagagtttaatccgaatgaagaaatgacgaaatatttcaagctgaccgccttgttcaaggaggcaggcattgatcctgactattatttagtcgtcgactcttcctctgacttgccctacgacttctacagaccaggggaggaagaagagagactgccgatccaccttttgacgcaaagtggtcatattaaagagctgtcgagacagtcagatattgttgacgccatttccggtaaacgaagaaccgatcataaactttatttcccgatggacttaattgtagatatgtcggaaaaagctgaagaaaagaaggcgatcatgaagctgcttggattgggataaggaagtactgaaaaaggagatgtcgggaatttgttgaaagagcatgcaaagttgatgaaggtattctctgaatcaggggaaatcgttggacggaagaagctgcaaaagatgatttacatagcaaaaaagctagatttgcctttttacgagaaatacgattttcatttttatggcccctattcagaggagttgacgctcagaattgaagagctgtgcaaccttggattcttggacgaaatgaaggaaaaaaagggcggatactatcaatatcgctattcgctgacggacaatgggaaagagtttctcgatcagtgtgaagtggacatgcctgacctcaaagtactgacgcagcagatgaacgagcagtcgtctcgtttcctagagctcgtctccacaattttatactttgatgacctgccagaagatgaggtaaaggaaaaggtcttcaccattaaaagcaagcagcgctatacggacgaagaatttgaggatgcgcttgcttatattgatcaattgaaggaattgaactagtttcgcaaaagcccagcatttagggctttttttgttttgtaagacccagaccaaaagcgctatttttcgatgaaatgtgtgctgaaatatccgaaaaattagtgaatatgacgtatttcgacttttttctgtgtatctaattccctgtttttgactgaatagaaggaaaatggtgaattttcagtgaatatataaccttgtaaaaatcaaaggagggataggaatgaaaaagcgttcagtctttttgtcatttttattggtaggtagtttgttaccgggagtaagttcagcttcggcaccagtcgcgagtgctggtcatgggcatgatcatggtcatgcgccgtttgaaacacatattagtgaggggttgccaaaggcaaacgattttaaagatttgacgaaagcacctccaattgaacgagatgtgaaaacaaaggtattagatgagtctggtaagcaggtaggctctagaacctttaaggcgaatacaggagattctatttcaacaaaggcaagtacaggcagtcagaaagtaacggtctatgctgtagcagatgcgcagtatcgtgcgaaatatagtgactggcagacgcggattgtcagcattattgagcaagcggacgtcacctttaaccgtgaccatgatgtagactttgtcgtacaagcagtaggatcttggacatcttctggatcaaatgcagagcaaatcttgtcaaaccttcagcgcagctttgatggcagaggatacgattttgtcacaggatttacagcaaatccaaactttgatgcgggcggaatcgcatatgtatacaatagtgcaccgagcggaagtgcatttgccgtcaaccttgatcaaggaacagcgaatacagcaaaagcggctacgcatgaatacggtcataactttggcttaccgcatgaccctcaaggcagcggcattgtctgcttaatgaattatgattattcctacacagtcgatttctttgatgcggctcataaaaatcaagtgaaccgtaacaaagcgtggtacagataaaataagagacaaaaggacaaacaccctatgtgcttgtcctttttttatgcttacaggtcgctgattcgttttcctgctacggcatagtgttcttttttcatttcttcaataatgacagagactttttctgcacctgcgcctgttgtttcaacaacagcatcagtgactttctctacaagagctcttttctgctcgtctgttcttccttctagcatttgaacggtgacaatcggcaatgcgaaaacctcctttttccttttcgtgctacgcttccctttagtttaagggacttcttatagtatactgaatgaagtaaatcattgtatagaaagaaagagggattcatgcctttggaccaatttcttgtgtatccattagaacttattccatatgtcgccattacgcttgttgttgcatttacgatgcacgagctggcgcatgcatatgttgcgtatcgtttcggagacccgacagctaagaaccaagggagactcacattaaatccactgaagcatcttgatgtatttgggacgattttgatctttgtggctggattcggctgggcgagacctgtgccggtcaatcgttaccattttaaaaacccgcgcttagcaggaatctgcgtctcgattgctggtcctttaagtaatttggtgttggcgtttctaggctttttcgtgtacgtgcttcttcagaaatttggtggggagacgctcatgcgctttgagccgggagtcgattatttcttccgaatctttattaacttaaacgtcattttgttcctatttaacttattgccacttccaccgctggatgggtatcgtattattgaggacgtcgtcagccctcgtatccgggcgaaaatgacgcaattcgaacaatatgggatcattatttttctcatattcgtgatcacgccgctaggacaatttatttttggtccattgatcggaatgcgggatcaaatcattcaatggtttggacttattttgaagccgctgctttaggaggtttaatgaatggaaggtaaaaagaagaaaccaattggttttaatatcattaaaaaaacagatgcaaccgacggacacggaggctttggagcgggtgcgctcagcctagataacatttcgccagtgatcattgacgtagaggaaaaggaagcggtcattgatattggtgcaatgcatgcgagaagtgccgtggaaaaagggattaaattcttgaaaagcaaagaagaggtaccgaacggaaagccgtattggctcgtatgggtaaccattgaccgcagagaagaaggcccttattatgcgggtgtgacggcatgtgaaatgaccgtcgaccgttcaatccgccgcgggtataagtcgcttccagagcatgtgaatttaatggataaatcaatgaagcgaaaaatcgtcgtcagtcatatggatgacgtctcgaaaaaggtgctggctgatttcttgaagagtcataatgaagcactatgggaagcatccacagatgaattaaaagaaggattgtctgtctctgaataattgtgaaatttttgtgaagaatggtgaattgctaccaattccagctggtttttgagtaaactggtgttaaagctaggacatggagaatcccgagatgcagatctcggggtttttcatgtctttttttaacgtttcagccacttttcccaccatttctttggcctttgatcttgaaccggatcttcctcaaaagatttatcctccgcaccgtagcaaacacctgtcggctccgttccttctataaaataggtgaatacctttgattcacaccctggacccgcaagatcgccggtttttggattgatatacacaccttttacaccgtctggcggcatgaaggaggacgctggctgcttcgagagggctgattccataaaggatgcccatatcttttttgcataggctgtttcttcgaccgagtcaatggtacgccctttatcatagccagtccacacacctgtgacgagctggggagagaagccgatcatccagctgtccgctcctgtcgttcctgatttccctccgtatgttcgtgtgagatccttcataatggtgcggccagtgacactcgtatagccgtttaactgatcattgaacattcctgacatcatatcggtggtaacaaatgctgccttttcatctaggacttgctctcgtttttgtttttcttcaaaaagcacgttgccttttgcatccgttactttcgtaataaaggttggtttgacgcgttttccgccgttgaccagcatggcgtaagcattggtcatttcaattggtttgacaggggacgtgcctagggcaagtgatggcacttgatctagtttttcgttgatgccaaatgttttgccagcacgtacaagctgctccattcctaaaaatagatgggttttcacggcataaatattatcagacagcgccaaggcctgaagcatggtaatgccatcattggcgtaatagccatgataattgcttggtgaataagcagcaccgcttccttgatcatcgagctcaaaaaccgtttcttcactgcgcatgacggttgctggtgtaaacccattttgcaaggcaatgtaatagagaagaggtttcattgttgaaccgggctgtcttttcgcttgtgtcactcggttgaatggacttttctcataatctcttccccctatgagggcgagtacatgacctgtttggggatgaatagcagtaaaaccgatttggatgtctgatttcgaatacatcgtgttttttaacgtcttctctgcgattttctgtaactctggatttaaagtcgtttggatatgaaggccatacgtttcgatctgctcctcagttaaccccaagctttgtttcaactcacgaattacatcatcataaaaatacggggcttgctttgcttgcagctgcttcttctgcaaagggcgataggacagtttttctttcgcggcttcagcggctgcctttttcgtaatcatgccgtcctcttgcatgtgcctcaaaatcatattctttcttgcgccggctttctcttcattcacataaggggagtagagagaagggccctttgggataccggcaagtaaggcagattcagcgagggtcaaattcttcgcttttttcccgaaatacagccgggacgccgcttctacgccatacgctccgtgaccataataaatggtgttcaagtatccttctaaaatctcatcttttgtatagttttgctctaagcggatcgtgtaaaaggcttcattccacttccgcttccacgttttatcatgatctaaatacaggtttcgtgcatattgctgggtgatcgtgctggctccttgtaccttagccatggcacgaatatcagccactgcagcacccgccatccgtttcacatcaaaaccatgatgctcataaaaggttttatcctctacagctacagctgcctgcctgatatgaggggacatgtcctttaatggcacccaatatctcttttctccaaagctggattctccaagctttgaaccatcggctgcataaatggtcgtggattggggaacttgaacagaaggggcaccttgccatttggcaagtaaaagaatcgtcaaaaagacagtgcctgcaaatagaaaagcgagcaagccgataaaaaaacaggctcgaatcgttttcacggtcatgcggatttttttattactcatgattgtgtccatgcaaagcccccattttgacggttttttatcagtatggaacaaagaaaaccgttttaaacaaatgattgcaagagcgtgcattaaaattgaagagaactcatgcggttctttacaatttgatatgaatccactatacttttttcttggacaatcgatatagtcatagccgataaaggcgctaacaatagatgtttgtttattattggatgagaggaagatggacaatgagcgaactttggtatacagagaagcaaacgaagaattttggtattacattgaaggtgaacaaaacccttcacacagaacaaacagattttcagcatttagaaatggtggaaacagaagagtttggcaatatgctgtttttagacggtatggtgatgacatctgagaaagatgagtttgtataccacgaaatggtggcacatgttcctcttttcactcatccaaacccggaaaatgttcttgtcgtaggcggaggagacggcggtgtcattcgtgagatcctcaaacacccaagtgtgaagaaagcgacacttgttgatattgatggtaaagtcatcgaatactcgaagaaattccttccttctattgctggaaaactagacgatcctcgtgtggatgtcaaagtcggagacggctttatgcacattgccgaagctgacaacgaatatgatgtcatcatggtggactcaactgaaccagttggaccagctgtgaacctgttctctaaaggattttacgcaggaatttcaaaagcactcaaagaagacggtattttcgtggcacaaacggacaacccttggttcacacctgagctaattacaaatgtacagcgcgatgtgaaagagattttcccaatcacgaagctttacacagcgaatattccaacgtatccaagtggtctttggacatttaccatcggttcaaaaaaatatgatccacttgctgtagaagacagccgtttctttgatattgagactaaatattacacaaaagaattgcacaaagcggcattcgttctgccgaaatttgtgagtgacttaatcaaataaatcaagcgaagtggaaatgcgcaaatgacagtttgcgcattttttgaagcgtaaaaggaggaatcttgcatgagattcgacgaggcttattcaggaaaagtgtttattggaagtcatccgacatgggaagatgcaaaagtcattttatacggtatgccgatggattggaccgtcagttatagaccgggctcacgttttggcccaaaccgtattcgtgaagtttcgattggattagaggaatacagcccttatttagatcgtgaactgcacgaggtaccattctttgatgccggtgacattccgcttccttttggaaatgcacagaaaagcttagacttaattgaagagtatgtcgacagcattttagaaaaagggaagtttccattaggaatgggcggtgagcatcttgtgtcttggccggttttccgtgcgatgcataagaaataccctgatttggcgattattcatatggatgcacatacggatcttcgtgaggaatatgagggtgagcctctgtctcattcaacaccgattcgtaaagtagcaggacttattggacctgagaatgtgttctctttcgggattcgttctgggatgaaggaagaatttgaatgggcaaaagaagcgggcatgcacatttctaaatttgaagtgctggagccattaaagcaagtattgccaaagctgaaggggcgtccagtttatgtgacgatcgacattgatgtactcgacccagctcatgcacctggtacaggcacggtggatgctggcggtattacatcgaaagagctgctagcatctattcatgccattgcaggatctgaggttcaagtagtcggtgcagaccttgtagaggtagcacctgtatatgatcattccgaccaaacagcgaatacagcgagcaagcttttacgcgaaatgctgcttggatttgtgaaataacaccttgatagaggagcttgtcatctcatgtagacaagctctttttttacatggaaaaggaggcagttcatgttttcttctatattgatggtgcttctcgctttatgtgtgttagcgacaggcattctcacgctgaaacgagagctcaaagctgagccgcccgtttttgcttcgaaaaaggaagcaaaggaagagatgatggggctgtttcaggatcgaggctttttctatctgacggccattgcgttattcatgcaggtggtatgtaagcagacgcaaatcgtgccatttgattttttttaggtatttttggcaagttcaggcgtacaagctcttttttatttaatcaacagaaaagacttgggcgtaaaggctggattggtggtattagtgagtgtcctgtttctttttttctaaagggatggcggaagatcaaaaacgaagtttaatcgccgtgaagaagagaaatgatggtatgataggcgatcatgaatatggtatactattttagttaaacgggtcttagcaaaggaagtgcaaaatgacacaaaaccaaatttcaattcatgtcaagtcagtgatgaaaccagagacggagccggctgaaacgatcgaattccgcacgactggaacgtatcaagagaagaatgacaaaacgtatctcacttaccatgaagaacatgaaatgggtcaagtaaaaaccgttgtgaaaatgagtgaaaaagaaatttttgtcatgagatcaggtgccattcaaatgaagcagcgctttctcatcggagaaacgaccgtcacacattacacgatgcccttcggtacactacagcttgatgtacacacacatggcattgatctagatgtggacaagggactgctgcacattacgtacgatatgctgacaggggaagatcaaaagcatttacatacattatcgatttcgtataaggaggatttacgttcatgaatatcgcagaacaggtcaaagatgcgttaaaagaagaaatcattgcggcagtcgtcaaagcaggacttgctgatgaaagccaggtaccagatgtccttttagaagtgccgaaagacaaaactcacggtgattactccaccaacatggcgatgcagcttgcccgcattgcgaaaaaagcacctcgccaaatcgcagaggacattgtcaatgcgtttgataaagggaaagcttctattgaaaaactggatatcgcaggtccagggttcattaacttttatatgaacaatcagtatttaacaaagctcatcccagctgtccttgaagcaaaagaggcatatggtgaaacgaatacaggcggcggccaaaaggtgcaagttgaattcgtctcagccaacccaacaggtgaccttcaccttggacatgcccgcggagcagctgtaggtgattccctttgcaacatccttgataaagcagggttcgatgtgagccgtgaatactatatcaacgatgcagggaatcaaatcaataacctcgctttatctgtagaagtacgttactttgaggcactcggtcttgagaaagatatgcctgaagacggctacagaggagaagacatcaaaggcatcgggcaaaagcttgcggatgaatttggtgaccgtttcgtgcatgagccagaagaagagcggatgaagttcttccgtgaatacggattaaaatacgaattagagaaattgcgtgtagaccttgagaatttccgtgtcccatttgatgtatggtattcagaaacctctttatatgaaaacggaaaaatcgaaccagcgctggaaacccttcgcgctaaaggctatgtctttgaagaagacggtgcaacgtggctacgttcaactgattttggcgatgacaaggaccgcgtgcttattaaaaaagacggcagcttcacttacttgcttccagacatcgcatatcataaagacaaactagacagaggctttgatcagctcattaacatttggggagcggaccatcacggctatatcccccgaatgaaagcggcgattcaagcacttggatatccagctggcaagctcgaagtagaaatcattcagctcgttcacctttacaaaaacggtgaaaagatgaaaatgagtaagcgtacaggaaaagctgtcaccatgcgtgacctgattgaagaagtaggcttagatgccactcgttatttctttgcgatgagaagtgcggctacacacatggactttgacctagacttagccatctctacgtctaacgaaaaccctgtgtactacgcacaatatgcacatgcgagaatttgcagcatgctgcgtcaaggtgaagaaaaaggctacgagccgaaccttgaaaaagtagatttctctcacattcaatcggaaaaagaatacgatcttctcaaaatcattggcagcttcccagaagttgtagcagaagcagctgaaaagcgcattccgcaccgcgtgacgaactatatttatgaccttgcatcagcccttcacagcttctacaatgccgagaaggttattgatgtagaaaacgaaacaaaaacaacagcacgcctatcactgatgaaggcgacacaaattacactagccaacgcattaaaactcattggcgtatctgcaccggaaaaaatgtaatgcaaaaagccccgctctattttatgagcggggcttctttatataaaaaacccgctattctcgagagatagcgggttttgaaaattaaccaagcgtattaataatgttagaaatagaatcgaataattgactaagtacatcagagaacatgagcgtatcctcctttcagaaagcatgtagtatgtgcgtgtcattggaattacccaagtgtattaataatgttagaaatagaatcgaataattggctaagtacatcagaaaacatagtttgtatcctcccttcggtaagcatgtagtatgtgtgcgttaattagaattatccaagtgtattaataatgttagaaatagaatcaaataattggctaagtacatcagaaaacatgttgttgcctcctctcttttctttttacatctacttaacgaagggggaaaagggttggatcacttttttctaaaaaaattttaaaaaagatcgtggcatagaaaaaagcaccgtttatttgggtgcttttttggctctgttttatgatagaatgcgcagctgcacggctccgtttttacacgctagcttcacgtctccgccaatcggtaaggtgaagaccggctgcgtatgtccgatatcgacatcgtagatcactgggatgtgtttgagcattggatgtttatctaaaatgaacctcaaatgttcctctgtcatctcggatttcttttggaagcgtccgatgatcaaccctttgattgattctgcatgctgcatgagggaggtgaggtctctggcgaacatttcagggaagaccaactcatcatcctctacaaataagatggcatccttgatttgaggcataaacgatgtcccttgcagtaagttcagtgtacaaaggtttccgccaaacaaggtgccttcagctgttccttcctgatacattttccatttcgtcggatgaaactgcctgttcgcttgatcgagataccacgcgtcatcactccattttgtcgaagggatcacatcaaatggctcaccgccgttcatcaagcaggcctgaaacatagcggactgctcctcttgcccctgctccatttggaagctggagaaatggggtccagagtatgtcaccatatcacatttggcggtaatggcgcttgcgagtgcggtgatatcactgtagccgcaaagaactttaggatgctgacgaatcaagtcgtaatcaatgtaaggcaagagttcattgcaattgaagcctccgatggctgtcaaaataccgtcgacttcgtcatctgtgaacgcctcatgcagatcagacaagcggtgttcaatggataacgaggaatgaagatcacattcaaacgcgtgttttccaaaagagacagtgaaacctaaggtctctaaacgtttttttgattgagagattccatcttctgataaaatgctggcacttcggcttggagcaatgacacgaatatgatcgcccttttttaaaggagagggtgtatgcataaacaaatcttcctttccatcacatatttctccattatatcggatcaaatggtccaagtctgtaaaagctaggagaaaggcatagaccgtgcgtttcatacaagctgtgcaaagggtatggaagagaaaaagacagaaacgaatgagggcggagaatgtgaaaaagaggagactggaatttttatttttatattttatgatattcggggcatatgtggtgtattggtggccggtgccagcgtggagcattcagctgtacgcggcagtttatatcgccattattttatttagtatcatctcactcatgctagagaaccgtacatcacagcacacgttgttatggatgtatgtgctgatctttttcccgatcattggctatatgttttatttgttctcaggacagctctatgtgaaaggtcatttattcaaatcaaagagaatgtacaaccgtgaaaagttacgcagaatatctgagcttgagagcaagccggatgaatcgcgtctaaccgaaaatcagcgaactttttttcattacacagaaaaagcaacaggcatgcatgtgaacacaaatagtgatatggacattttaaagaatggggaggagacttttccccgtatttttgaagaattaaaaaaggcaaaatcgttcatccatatagaatactacatgttcaaatcagatttcctcgggcaccggatgatggagattctgatagaaaaagtgaaagaaggggtagaggttcgcttcatctatgatgcggctggcagcattcgcttctcccgaaaagatattaaacgcttgaagcaggaaggagtaaaggtcgctccttttctgcctttaaaatatggtttttttaatcaaaaattcaatttccgaaatcaccgcaaaatcgtgataattgatgggaagacagggtttgtcggtgggttaaatgtcggaaaagaatatgtcggacgtgatgaaaatatcggtttttggcgtgatacgcataccatgttaaagggtgaggctgttcaaacccttcactctgtttttatgctcgactgggagtatgtatcagatgaagtattaattgaggatccgaagtatcatacgccgcactctgtgacgggagaggatgtcattcaggttgtaccgactggacccgatatgaaagaaagtatgagtgatttatatgatgcactcatctcaaatgcgaaacaatttgtctggattgcaacaccttattttgtcccaaatgaatcccttcgtacagcattaaaaattgctgctacaagaggggtggatgtccgggtgatggttccggagatcaatgacggctttctcacacaatacgccacacgatcctatttttctgagctcctaaaagagggcatcaaggtgtatcactatcaaaagggcttcatgcatcaaaaagtgatgatcgcagatggagaacttgcctctgtcggtaccgcaaatgtggatatgcgaagctttcagctcaattttgaggtcaatgtctttacagccgcgaaaaagcccattgagcaactgatggcccactatgaggaagatatgaaagaatgtgagcaaatgggacctgttcatttttataaaagagggttaaaagagcgattgaaggaatcatttgcccggttgttttctggcgtgttatgaggatttcaagtcaaagaaatcatttcctgatctagtattttaaagaggattcctctataattgaaaatgattatcaattatagaggaaatgaggttcttttacatatgctaaaacgctttttcgcctattacaggccctatcgaggtctgttctttttagatttcttttgcgctgtcgccgttggattgatggaactgggtttcccgcttatcgtgaactacttcattgatacattattgccaacagggaactgggcggtcattggctggaccgcacttgcgctgtttgtcatttatgcactcagctcggttatgcaatttattgtgtcgtactgggggcatatgcttggaattaatattgaaacagatatgaggaagaagctgtttgatcactttcagcgcctatcctttaaattctttgataacaacaaaacgggtaagctcatgtcacggatgacaaacgacctcatgtacattggagaagtggcgcatcacggtcctgaagatttgtttatagcgattatgacaattcttggtgcctttgctgtcatgctgatgattaactggcagctggctattttaaccttcctgatcatgcctgtcatcatctggcttgcccttcattttaataagaaaatgacgcatgcgattacacagctgaacaatgacattggagactttcatgcaagggttgaaaacaatatcggcggcattcgtcttgttcaagcctttgccaatgaacatttcgagaaaaaacgttttgctgaaaacaacaaccggtttcggaaggcgaagcttctttcttataaaattatgtcggtcaatggatcgatcagttacattctcacacgtcttgtgacactgtttgtccttctcgcaggtacatggtttgtcctgcaaggtcaattaacggcaggtggctttatcgcgtttgttctgatcacaaatgttttatttagaccgattgataaaatcaacacggtcattgaaatgtatccgaaaggcattgcgggctttaaaagctatgtcgatttgctagaaacagagctggatgtgaaggatacagagggagcacgtgatgtatacggactgaaaggtgaaattgaatatcgaaacgtgacatttggctacgatgagcacagccatgtgctaaaggatatcgatttaaagatcaaacaaggagaaacggttgcgtttgtcgggccttcaggagcggggaaatcaaccatttgcagtctgctgcctcgtttttatgatgtggatgaaggggacatcacgattgatggtgtaagcacaaagtcgatgacattgtcttctttaaggcagcagatcggtattgtgcagcaggatgtctttttattctcgggcaccattcgtgaaaacattgcgtacggcaacctagaagccagtgatgcagagatttgggaggctgtaagaagtgcgcatttagaggaactcgttcagcgtttcccagaagggttaaataccgtgataggtgagcgcggcgtcaaactgtcaggtggtcaaaagcagcgtctgtcgattgcgcggatgttcctgaaaaacccgtccattctcattctagatgaagccacatcagcacttgatacagaaacagaaaaagccatacaggatgcattgagcgaactggctgtcggacggacaacgctcgtcattgcccaccgccttgcgacaattaaacacgccgaccgtatcatcgtcgtgacagaggaaggcattcaagaacaaggccgccaccaagacttaatccaaatgggcggcgtatacagcagactgcacgaagcgcagtttggtcattaagaagaaagagaaagcccttttgataaagggctttcagcgtgtagacaaaccctcgcattcgttgtcagtcctgcgctctggtgctcacgaatgttcaattcgctccgctccagtgctcgtccttcctagactgcaaaggttttctatcacgctgaaaaaagataaaggactaaaataaagatcattatagccctttgtcaaaaatctgaaagcccttttgataaagggctttttttgttaggatagaaaaaactcgtgtaggaaggatctgatggaatgaaggggcttcggcgattacaaaagggagataagatcggtattttttcaccttcaagtcctgcatcagcgacctcgcctcttaggtatcagcgggcgaagaagtggcttgagcaaaaaggattcattgtggtaccaggatcattaacagggaaagaggatcactaccgttcaggtacaattcaagaacgagccgatgagctgaatgagctaatggctagagaggacttggcgtgcgttatgtcaatgattggcgggacaaattcaaatagtttgctgccttatcttgattttgagctgctgaatcaacatccgaaaatcatgatcggttattcagatgcgacagcgattcttttagcagcctacgaaaaaacgggactgcctgtattctacggaccggcgcttgtcccatcttttggagagtttgaaccgttcgtcgcttatacatatcagtcgttcgaagacatcctgatgcagcctcaaaccattccttatcaggtcaaaaaaccacctttttggacggatgaacgaatcaattgggaagaaaagacgcgtgataaaaagcagcgtccaaacgattggctgtgcgtcatagagggacaggcagaaggtagattgatcggcgggaatctgaatgccatgtacggcatatggggaagtgagttcatgccagccattcaaaacggagacgtcctccttattgaagattgcatgaaaaccgcttcggttgtagaaaaaaacttctctttattgaaagtaaatggagtgtttgagcgggtatcaggtattcttttgggaaaacatgagctgtttgatgatgagggaacgggaaaagaaccttacgagattttacttgaggtgcttggagagacaaagagaccgctcatcgcagattttgactgtgcccatacacacccgatgcttacgatgccaatcggggcacaagtgaaaatggatgcagcttcaaaacaagtttggttgacaaaagagtggatataacaaaagagcggcctgagggctgctcttttttatgaaacctgctctttttcaaatggctgcaagagatcttgcgctttttttccctctacgacaattaagtaatcagactctaaatgagtgagcctgaaggtttcaagctctacgatgttcttgatgttgcacattgtttttttagaatacacatatagacgatgttgagcctggtggcatttttgataaagagaaataagcttatgtaaattcaatgctttcgcagcgatttggattgaatagatttgagacatcttcatatcctcctgttaattactttctcacaatagctttgttacccctgtttgcacagggataaacctttctctatgatttccactcaaaggttcctccgcccgttcgcttattgcctcttatcgcagacagctcttcgacaagtcggagcagtgcctgatcctttaacttcgcctcaatcataaaatctacatcacgcccatacggttttaatgcatgaaaaagcggtaagacaaaggacatatctacaccatctgcatgactgcgtatggctttttctgatttaggtgaggataaatggattttaggcggaatgccagtgctcgtccaagtgtcgaacattcttggcagaatgtcttcaagcgcggcatcgtcatctttattggccacgtgatgatggtaatcaaaaacaaatggaataccttgcttttcacatacaccaagggtttctaacgacgtataggttttgtcatcattctcaagcgtcattctcgccttgatatgcgccggaagcttttggatattgtcatcaaaacgttgaagcgccgattctttatcaccgtacgcaccgcccacatgaatgttcatatagccttccttttcgagcttcatcgcttcaagcatttgataatggtacgtcatatcgatcacggcattttctgtgattgaaggctttgggctagtaaacaaggtaaattgattagggtgaaagctcacacgtaatccgtgccgtttcaccaactcgccaatttcatgaaactccttttgaaaaggtgtcacaaagtcccagcgcacatcgggatgggtcgcgagcgggacgatcgaacttgaaaaacggtaaagcgggatatcatgggcaatggcgaaatagagcgttcttaatgtattcacgagattggctttcgttgttcgcaataaagcctcttctctctcttcctttgagagcttactgtatcttgcaaaggtcagcgacttggcaggagaagcttcccacaaggtgacggcattggatacataaccaaatcgataacgcataggtcatctcctttataaaaagtacgagaacatggcgccaacccattccagcggacgtgacaaaagcggacgctgggtcaatttctcctctgtcataagctcagacacttccatgtgctcccgaattttttcctctacgtgtgcagtaaagtcggcatcatcaatggcgacgtctacttcctcatttagaaacaagctgcgtttatcaaaatttgccgtgctaatcatacagcgtctctggtcaattagaatggctttcgcatgataaaatcctttataaaaacgatacacaaggcagccagaggcaatgaggtctttcaaataatgaaatccagcctctttgacaagtggatgatccgctttcattgggatgatgatttcaaccgtgacacctcgctctcgtgcatcaagcagtgcactcagaagaggggcagatggaataaagtaaggcgtacagatgatgatctgctttctcgcctgctgaatatctttgagaaacaaagcttctaaagaaaaaccagcagtcgcgcgtgttgtgcattgtagtgttcccagttccaaagcaggaaaaacctcatattgcagctgatgaatgccagatgaccggtataaatcattcaaaaacacatgctggagatctgcgacaacttgccctgtcatgcgcaaatgataatctttccaaatgccaaactggccattttttccaacatattcatcgccaatattaaacccgccaatatagccaatctttccatcaatcaccgtaattttacgatgatttctcatgtttaaccgataaatcaaaaaagggaaacgaggcttatttaaaaagtaaaattggatgccgcttttttctagcatatcaatggacttttgatcaaacggataggaccctagtcgatcggtcagcaaaaagactgaaaccccttgttccgctttggctttcagtgcttgtaagaccccttggccaatcttgtcgttctttacaataaagaacatcatatgaatagaagaagaggcctgttgaatatccgcgagcagctgatcaaaaaatggttcgccatcatgataaaaagctgcatcaccgcttgttttgtcaaaagaccgttcaaaagcgcgggtagaaaaatatttctttcccatataaaggtctaccatcacgagaaaaacgatggcaatgagtacgagtaggatgatcaatgcgatcatgaagcttcctccttttttgcatatttcaatagtgtacccaaacgtgtaaaaaatattgactgaatgctcattcattatttatgatagaggtacaacatagaaacggaacaaagtggtttttggggaatgaaagggggagcaagatgaatagccttttaataatgaacttgatcgcatttgcggcggtgaccgcttacgctgtgtatttgtttatttatctcattcgaacacgagcggcgtatattcgtcttggtaaaaaagaagaatttcaacaagacatgaagaaacgcttagagcgtgtttgggtcaatgtgtttgggcaaaagaagctgttaaaggacaagaagagcggcatcattcatgtgctgtttttctacggatttatccttgtacagttcggagcccttgattttattatgaagggactcgttccgggcagcggactccctttaggtccgctttacggcttctttacctttttccaagaggtggtcacacttctcattttagtagccgttgtttgggcattccatagaaggtatgtggagaagcttgtccgtttaaaacgaggctttaaatcaggtctagtgcttttatttattggcggcttgatgctgacagtcttactggggaacgggatgaacatcatttggcatggacactctctatcatcaactgagccaatcgcctccagtattgctttcttgctgggcggaatttcacctcttgcagcaacggtcgttttttatgtcgcatggtgggtgcatctccttattttgctgacattcttagtatatgtcccgcagtcaaagcacgctcacctcattgcaggaccggtgaatgtatttgccagcagattagacccgccaggcaagctgcaaaaaattgattttgaagatgagacacaagagaccttcggtgtgggaaaaattgaagacttccgtcagtcacagctgatcgacctttacgcctgtgtggaatgcgggcgctgcacaaatatgtgcccagcaacaggaacagggaagatgctgtctccaatggatttgattttaaggttaagagatcatttaacaaataaaggggccgccattacatcgaagacaccatgggtcccgcagcttgccttcaggcagacaacaggaaatcagctggcgctgcaggcgagaggagcaggtgcagaggaatcggcggccagctcaatgtatcatccttctctcattggtgaggtcattacagaagaagaaatttgggcatgtacgacgtgccgaaactgtgaagaccaatgccctgtcatgaatgaacacgtcgacaagattattgatatgcgcagatatcttgtgctgaccgaagggaaaatggatgcagatgcacagcgtgccatgacaagcattgagcgccaagggaacccgtggggattgaaccggaaagaaagagaaaattggcgtgaactgagagaagatgtgcatgtgccgacagtaaaagagctgaaaaaagcagatcaaaccttcgattatttattctgggttggttcaatgggggcatatgacaatcgaagccaaaaaattgcgcttgcctttgcaaagctcctcaacgaagcaggggtctcctttgccatcctaggcaataaagagaaaaactcaggcgatacaccaagaagacttggaaacgaatttttattccaagagcttgctgcaaaaaatattgaagaattccagaaaaacggggtcacaaagattgtgacaattgatccgcacgcctacaatttatttaaaaatgagtatccagacttcggacttgaggcagaagtgtaccatcatacagaattactggcagagctagtgaaagaagggaaaataacgcctgtacatgaagtgaacgaagtgattaccttccacgactcttgctacctaggcagatataacgaagtgtatgatccgccgagagacattttaaaagccatccctggtgtgacgctgagagaaatggagcgtcatcgtgaaaccggtatgtgctgcggtgcaggcgggggcttaatgtggatggaagaagagacaggtacccggattaacactgcccgaacggagcaggcgttacaggtgcagccgtccatcatcagctcaggatgcccttattgcctcaccatgctgggagatggcacgaaggcgaaggaagtagaggagcaggtaggcacatttgatgtcgcagaacttcttgaaaaatcagtgtttggtgaggctggaaagcaggtttcgtaaacaaaacaggccgatgaataggatattcatcggcttatacatggcgctgtacatcagctgcctagataatatgtaagcggtaacaaacgggaggggacatacatgagaacgacggtcattgtatctggagcaagaacaccatttggaaaactaggcggtgctttcagtgggttgactgccgcagaactaggcggaatagcgatcaaagctgcgctggaaagagtacgggattcacattttgtggatgaggtcatcatgggaagtgttttgcagggaggacaaggacagattccttcaaggcaagcagcaagaaatgctgaccttccatggtccgttccgacgcaaactatcaataaagtctgtgcatcaggaatgcgcagtgtgagcacagcagatcaaatcattcgagctggagatgctgaggtcatcgtagcaggcggtatggagtccatgtcacacgccccttatttgctaaaaaaagcgcgatggggctacaaaatgggagatggtgcggtacaagatgcgatgattttagatggattaacctgttcatttacaggcgttcatatgggtgagtatgggagcatggctgcaaaggagcttggtatcacgcgggaagagcaagacctttgggcactaagaagtcatgaacgggccatcgaagcgcagaaaaacggcttttttcaacaggaaatcaccccagtcaccgtcaagacgaaaacgggagagcggctgatcacagaagatgaatccccgcggcgtgatacgtcatatgaacggctgtcaaagctcatgcctgtttttgatcaaacgggtaccattaccgctggaaatgcaccaggtgtcaatgatggagcaagtgcgcttcttttaatgaaagacacatatgcggagcagcatgacgtaaagccaatggcagtcgtgcttgggcatacgcaggtagccgtagaggcaaaggatttcccgaaaacaccagcctttgccatcgagaagattttacagaaaacaggcaagcgtctagaggatatcgatctctttgaaatcaatgaagccttctcagctgtggcgctggcatgtgaaaaaataaccgggctggaccggcggaaaatgaatatcaatggtggtgcagtagcgcttggtcatcccattggtgcaagcggaacacgtatcatattgaccttgattcatgcattgagacaaagaggcggaggcattggcatcgcggcgatttgcagtggaggcggtcaaggagatgccatcatgataaaggtagattaaaagggaggcgttcatcgtcatgagtacagaagagaccgtcatggttgttggagcaggtcaaatgggatcaggcattgcccaagtttttgctcagtcaggctacacagtcctgctgcatgatgcatctgaaaagcagattcatcgagccatttcctccatgaccaaacaactgacgaaacgagcagaaaaaggaaagctggcccatcaggcagtccgagatattacgcagcggcttgccgtttccacagatttaaaggacgtgcagcagactcatttagtgattgaagctgcatctgaacaaatgagtgtgaaaaaacaaatctttgaaacacttgatcaatttgcagaggcgaagacgatatttgcaacaaacacatcttccttgtcaatcacagaattagcagctgttacggggagaccggagcaagtgattggcatgcattttatgaacccggtgcctgtcatgaaactggttgaggtcattcgagcgctgcaaacaagtgacgacacgtatcaaatcgtttatgaaacagcaaagacattaaacaaaaccccaattgaagtggaagacttcccagggtttgtatcaaatcgcatattgatgccaatgatcaatgaagccatttacaccctttatgaaggcgtggcagatgcagaaagcattgacggggtcatgacgcttggaatgaatcacccaatggggccgcttcgtctcgctgatttcatcggactagatacatgtttatttattatgaatacccttcatgaaggacttggggatagcaaataccgaccttgtcctcttttgaaaaaatacgtaaatgcaggctggctgggtaaaaagacaatgagaggtttttacacataccacgaccactcatagggggagtcaagatggatgttttgcttacggatcaacagcgtctctggagagaacaggcagcagaatttgcaagacagcgtgtattccctgaagtggaagccatggaacaaggtcagttcccaagaacacttttagctgaaatgggacgccaaggctttctaggaattccaataccagcttcgtatcaaggcttaggagcagattttacaacttatatcattgcgattcatgaattatccaaagtgagtgcgactatcggtgtcattgtgtccgttcatacatctgttgtgacgatgcctattttggcttttggaacgaatgagcaaaaaaaatcctatgttccgctgcttgcatccgggcagaaactgggggcattttgcctgactgaacccaaggctggctcagatgcctccagtattcagttaagagcggagcgggcaggcgaccactatgtgttaaatggtacgaaaatgtttattacaagcggcggggaagcagaactgtatcttgtctttgcagtgacagaccctgcctctgcgaaaaaaaatatatcggcgttcattgtcgaaaaagatacacaaggatttacgatcggaaaagatgagaaaaagatgggactgcacgggtcaaaaactgtcacgcttcattttgatggtgtgcggattccaaagcagcagctgctcggtgcagaaggagagggctttcacatagccatgtctagtttaaatgcggggagaatcggtatctcggctcaaagccttggtatagcagaagccgcattagcggaggcagtgacgtatttaaagcagcacccagcaggtctagaaacgaccattcggctgggtgatttggcggcgaagcttgaagcagccaagctgctggtctatcaagcggcttcttataaagaggcgaatcgtccggtcacaaaggaagcatcaatggcaaagctatttgcgtcaaaaacggcagttgagatcagtacagaagtgatccatttgctcggcatggatggttatacgaatcgctatcaaacagaacgttactttcgtgatgcgaaagtttgtgaaatctacgaaggaacaagtgaaattcaaaggctggtcatttgtaaacagctaatatgaaacgaggtggctcatgatgcagtttcaattaagtgatgaacatgaaatgatccgaaaaatggtgagagattttgcgaaaaatgaagtagagccaacagcagcagagcgggacgagacagaaacgtatgatccagctatttttcgccagatggcggagctcggtttaacgggtatcccttggccggaagaggtaggcgggatcggcagtgactatttagcctacgtcatcgcagttgaggagctttcaagagtgtgcgcctctacaggtgtcaccctctccgctcacacctctctagcctcgtggcccatctatactttcggaacaggtgaacaaaaggagacctatttaaagccgcttgcagaaggacagaaggtaggggcatatgcactcactgagagcggttcaggttcagatgccggtggaatgaagacaacggcagtaaaggcaggcagtgaatacgtcctgaacggtgcgaaaatctttattacaaatggcggcattgcggattattatattgtgtttgccgtgacagaccaagaagctgcatctcgaaatacaaccgcctttattgtagaaaaagagacccctgggttctcggttggcaaaaaggaaagcaaactgggcatccgctcatcgccaacgactgaaattcgatttgaagattgccggattcatgaaaggaaccggctcggacaagaaggagaaggattcaaaatagccatgatgacgctcgatggcggtagaaacggtattgctgctcaggctgttgggattgcacaaggcgctcttgatgcggcggtccattatgcgaaggagcgcaagcaatttggcaaaccaatcatacagcagcaagggatcgcttttaagctggcagatatggcaactgcaattgaagcctccaggctgcttacttatcaggcagcatggcttgaaacgaaagggtttccgtatggaaaggaatcagctatgtcaaagctctttgctggagatacagccatgaaagtaacaacagaagccgttcaaatcttcggcggctacggttatacaaaggattacccagtcgaacgatacatgcgagatgcgaaaatcactcaaatttatgaaggcacacaagaaatccagcgcctagtcatctcgcgcaaactgctagatatgtagaaaccaagcaaagaccacctgacgtgaggtggtctgttttggtgcgataatcagttcttaaatgtgaaatcatttccaatattgtcccatgccaccttatcaatatgataaaatgtgcaaaagtatcaatatggaggttatcatgatgaacacaacatttatgggtattttaggattagtcacgatgatcatatggattatggtctccacagagctttcaaagtctccaaaaaagaaggaagaaaaagaaaacagccgcagaaaactatttgtcctcatgcctgcgggaatggtatgtacgattgctatcgttatcttattcattcagagaatccagttttaaaatagagatgaacaaactaaaagacaaaaagcataccgtacacaaaagccagaccaatttcacgcagatggtgcgccccatgagaaaaaatcaaaaattaacatgattaaaggtggcataaactcctctaatttgtttataatgagaggtatggtttgtcgtaaaaataaggtataaacacttattatttcactgataaatggatacatacatgtaatagaaagggagtgtctgaccttgagtttgaaagaatactcacaggagcagctcaagcacatgtctttagttgaacttgcatatgaaattttcagagacagcaaaacaccgattacgttttccgagttaatagatgaaatggtccgtttacaagggatacaaaaatctgatcttgatgatcgacttgctcaattttatacagacttaaatatagatggccgctttatttcgttaggtgatcagagatggggacttcgcagctggtatccagttgatcaaatcgaagaagaagttcagccagctgtgaaaacaaaagcgaaaaagaaaaaaacaaaagcagctgtcgttgaagaagacttcgatgaaattgaagaggaagaagaaatcgaagagcttgaagaagatcttgatcttgttgaagacgacgatgatctcgacctagacgatgatgaggaaattgacgaagatatagaagacttcgacgaagacgatgacgacgaagatgatgacggcttaacagaaattgacgaagacgatttagacgataataaggaagaaaaataaccctcacaaaccggtcctcaaaacaggacaaaaccgtcttgactttcgagagcgaactatgtagtatgtattttgggctctctaaaaagagtacgtaaagatacgttcatttacgctccctttcatttatttgaaagggagctttcttatttttcaagagatttagggatacactctaaaaaggatgaagctgtgcatgtctagtcatgcaagggtaaaaaagagaggagcatacgaaatgacaaagtatatttttgtaacaggaggagttgtttcctcacttggaaaagggatcacggctgcatcgttaggccgccttctgaaaaatagagggatggatgtcaccattcaaaaattcgatccatatatcaacgtagacccagggacgatgagtccatatcagcacggtgaggtcttcgtcacagatgacggtgctgaaacagaccttgacttaggtcactacgagcgcttcattgatattaacttaaataagtacagcaacgtcacaacgggtaaaatctactctactgttctgaagaaagagcgccgaggcgactatttaggcggaaccgtacaggttattccccatattacaaatgaaatcaaagaccgcgtgtaccgtgccggaaaagaaacaggtgcagatgtggttattacagaaatcggtggaacagtaggagacatcgaatcccttcctttccttgaagcgattcgtcaaatgaagagtgacattggccgtgaaaacgtgatgtacattcattgtacccttgttccttacatccgagcagcaggtgaactgaaaacaaaaccaacacagcatagtgtaaaagaacttcgcagccttggtatccagccaaacgttattgtggtcagaactgaaatgccaatgacccaagacatgaaggacaaaattgcgttattctgtgatattgatacaaaagctgttatcgaatgtcaggatgcagacacgctgtactctattccgcttgatttacaaaaacaaggactagacaagcttgtttgtgaacatatgaaacttgactgccgagatgcagacatgacggagtggacagcgctagtcgataaagtacaaaatctctcaaaacaagtcacaattggtctagtaggaaaatatgttgaactgcaagatgcatacatttctgtcgttgaatcacttcgccatgctggttatgcatttgatgcagacgttcaaatcaaatggatcaatgcagaagaagtgacagcagaaaatatggctgatttcgcgcaagatgtagacggcatcatcgttcctggaggcttcggagaccgcggagtggaagggaaaatcattgctacacaatatgcccgtgaaaacaaagtgccattcttcggaatctgcttaggaatgcaagttgcgtcgatcgaatatgcgagaaacgtactaggccttgagggagctcattcagcggaaattgatcctgaaacagcattcccaatcattgaccttctcccagaacagaaggatgtagatgatctaggcggaacacttcgtcttggtctgtatccatgtaaattaaatgaagactcaaaagcatttgctgcatacaatgacgaagtggtctacgaacgccaccgtcatcgctatgagtttaataatgaattcagacagcaaatggaagccgcgggctttgtcttctctggtacaagcccagacggacgtcttgttgaaattatcgagctgaaggatcatccttggttccttgcttctcagttccacccagaattcgtctcaagaccgacaagaccacagccattatttagagatttcgttggtgcttcactgcaagcatctgaatcaaaataaatcaaaaactgccgagaatatgatcttctcggcagtttttttattcatattcctcaacgatttctttcacagtaaacgatagagcgtggtagacgtataagcatgtcattaaagcaggataaccgaaccttgttccgtcatcagcgggcacaagcggtttcttgagctgaaaatcaatgtggacatcacaatgctcttcaatcatggacggctccttttgtgccggaccgacaccaacaatgggcgtaccttgcgcgtgcagctcttttacaagagattgaatctcctcgtcttctgggtctgaataaaatagcagcaccctgtcacttggatgaagcaagctgagctccgtttgatcaagcggcagtactttcgcacctggaaagggctccttgctttcagttgcctctagggctacagcagccagttcattctttccgtgaaaataaacagcatgtccactgacaacggcttgtgcaagaaggcgtgcaccatcctcgatcgcttcagcctgcttttctccaatacgtgaaaaaatacctgataactgggtcgtgaaaatttttaacaagactgatttcctccttcggtcagatcattttataatagaatataaagagaatattaggaaaaatgctcagaaaatgtcgtaaagtaaactattataaataaaggaaatgtgaaaatcaaacagaattatttaacaacagctctttttatggcgaaaaatgaaagcaatggggtgtaacagatgaatgagaaaattttaattgtcgatgatcaatacggtattagaatattattaaatgaagtgtttcataaagaaggctatcaaaccttccaagcagccaatggacttcaggcgttagatattgtgaaaaatcatagaccaaaccttgtcctgcttgatatgaagattcccggaatggatggtattgaaattttaaaacgcatgaaattaattgatgaagacatccgtgtcatcattatgacagcctatggcgaattagacatgatccaagaatcaaaagaactcggtgcattgacgcactttgcgaaaccatttgatattgatgaaatccgagatgctgttaaagaatacttgccgctcgaaacaaatggttagatggaaatgattgaatcgagtcattctgttgccgatttgtcgaataattggtatcctagataagaagaagaaagcgatctgactttgaaagtttacatatggcgagaaattctggtcatgctagggtggagagctttttttagtaagcaaattagctacatagggaggatttttcatcatgcctttagtttcaatgacagaaatgttgaaagacgcaaaggaaaaaggttacgctgttggacagtttaacttaaataatttagaattcacgcaagcgattttacaagctgctgaagaagagaaatctccagttatcttaggagtatctgaaggagcaggacgctacatgggcggcttcaaaacagttgtcgcaatggtaaaagcgttaatcgaagaatataatgtaacagttcctgttgcgattcatttagatcacggttcaagctttgaatcttgtgcaaaagcaatccatgcaggatttacttctgtcatgatcgacgcttctcaccacccattcgatgagaacgtagcaacaactgcgaaagtagttgagcttgcacatttccacggtgtatctgtagaagctgagcttggaactgttggcggacaagaagacgacgtcatcgctgagggcgttatttatgctgatccaaaagaatgccaagagcttgtagaacgcactggcattgactgccttgcacctgcactaggttcagttcatggtccatacaaaggtgaaccaaaccttggtttcgctgaaatggaagaaatcggtaaaatgacaggccttccacttgttcttcacggcggaacaggtatcccaactgctgacatcaagcgttcaatttcacttggtacagcaaaaattaatgtaaacactgaaaaccaaattgcttctgcgaaagcagtacgcgaaacacttgctgcaaaaacagaagagtatgatccacgtaaatatcttggaccagctcgtgacgcaattaaagcgactgttatcggcaaaatgcgcgaatttggttcttctaaccaagcataatttgatgagaaccgaaagccgcctgagtcacaggcggttttctccatatcttgagaaagcgcaatcaaaatttacatttcagacaatttattgataggagagtggcacggttatgttatttttcgtagatacagcgaatatcgcagacatcaaagaggcgcacgagcttggcattttagcaggcgtcacaacaaaccctagtttagtagcgaaagaaaaggacgtatcattccacgaccgtcttcgcgaaatcactgacgtggtatcaggttctatcagtgcagaagtgatttccctcaaagcagaggaaatgattgaagaaggaaaagagcttgctgccatcgcacctaatatcacggtcaaagtaccgatgacaacagatggccttaaagctgtcaaagcgttaacagaccttggtattaaaacaaacgtcactttgatttttagtgcaaaccaggcattgcttgcagctagagctggtgcaacgtatgtctctccattcctcggccgcttagatgacattggccaaaatggtctcgatctcatcagcgaagtgaaaactatttttgatgttcacggattagatacacaaatcattgctgcatccattcgtcacccgcagcacgtgacagaagctgcgcttagaggtgctcatatcggcacaatgccgctgaaagtcatcaagcagctgacaaaacacccgttaacggatgcaggcattgagcaatttttagcagactggaataaataagtgattgtggcaggcgggattgtctcccgtttgccgcagttttccttaaaaacgctaagaaatgttttgtgcaaagaagagaacatcacagcctcgcaaagcttcgattatttttcttccgacaaatttcgtttaacctgtattctttctcttgatattggctaaattttggacaagaccttttaaagcgcgacatccacaaacagtataactccaacagtgatcttctttaagaagggagacaaatatggaaaagttaaacattgccggcggtgaccctttgcgcgggaccgtacatattagtggtgcgaaaaatagtgcagtggcactgattcctgccacgattctcgctgattctccagtaaccattgagggccttccgcatatttcagatattgacacattacgagatctgttagaagagattggcggaaaggttacgtttgaaaaaggtgaaatgatcgtcaatccttcttccatgatcagtatgccgcttcctaatggaaaggtgaagaaactgcgtgcatcctattatttaatgggagccatgcttggcaggttcaagcaggctgtcatcggactgccaggaggatgtcacttagggcctaggccgatcgatcagcatatcaaaggctttgaagcacttggagccgaggtgacaaacgagcagggtgcgatttatttgcgcgctgaaaaattagtcggagctcgtatttaccttgatgttgtcagtgtaggtgcgaccatcaatatcatgctggcagccgtactggctgaaggaaaaacggtgattgaaaatgccgcaaaagaacccgaaattattgatgtagcgacactgcttgcaagcatgggagccaaaatcaaaggtgcgggtactgatgtgattcgaatcgaaggtgtagaatctcttcatggctgtaagcattccatcatccctgaccgcatagaagcaggcacatttttaattgctggtgctgcgatgggagatgaagttgttcttgataatgtgatcccaactcatttagaatcaattacggcgaaacttagagaaatggggttcaccattgaaacgagcaacgatcagatgctgatcgttggcagaaacgaaggactcaagcctgtcgatatcaaaacccttgtgtatccgggctttccgactgaccttcagcagccgatgacggcgctcttaacaaaggcgaaaggcacgagtgtggtcacagatacgatctactcagcccgctttaagcacattgacgaattgcgtcgaatgggtgcaaacatgaaggtcgaaggtagatctgccattataactgggcaaacgcagcttcaaggagcaaaggtcaaagcaagtgacctgcgtgcaggtgcttgtctcgtcgttgcagggttaatggcagacggtgtgaccgaaatcacagggcttgaacatatagacagaggatatagtttgcttgagaagaagcttgaaggcttgggtgcaaccatctggcgtgaaaagctgaatgaccaagaaatagaagaacttcaaaattcgtaaggctttgactgtgagaggagatttggacaaaaatggaaagaagtttatcgatggaactagtacgggtgacagaagcagccgcattaaaatctgcccgttggatgggaagaggattaaaagacgaagcggatgatgctgcaacaagtgcaatgcgtgatgtatttgataccattccgatgaaaggaacagtggtcattggcgagggagaaatggacgaagcaccaatgctttatattggggaaaagcttgggaacggatacggaccccgcgtggatgttgctgttgatccattagaaggaacaaatattgtggcaagcggcggctggaatgccttagctgttattgcggttgcagatcatggcaacctgctgaatgcacctgatatgtacatggataagatcgcagtaggtccagaagcggtaggctgcatcgacatcgaagcgcctgtcattgataatcttcgcgctgtggcaaaagcaaaaaacaaagatattgaagatgtcgttgcaacgattttaaacagagatcgacatgagaaaattattgctgaactgagagaagcaggagcaagaattaaactgatcgatgacggtgacgttgcaggagccattaatacagcatttgatcacacaggtgttgatattctatttggttcaggcggagcgccagaaggtgtcctttctgctgttgcgttaaaggcacttggtggtgaaatccacggaaagcttcttcctcaaagtgaagaagaactgagacgctgtgagaaaatggggctggatgttggcaaagtcctaagaatggaagacctcgtgaaaggcgacgacgccatttttgcagcgactggtgtaacagacggcgagctattaaaaggtgttcaattcaaaggctctgttggaacaacacatagtgttgttatgcgtgcgaaatcgggtacagttcgtttcgtagacggcagacacagcttaaagaaaaaaccgaatcttgtcattcgtccgtaatctgaaagcgggtattcattacccgcttttcatataggtgtcaaatgtatatcattttctttttaaagttgaatattctctgcaaatgaggtaaaactaaagagtgctgcgaaattttctgcgaatttacttcttttaagcttcaacaagtttaaatactgccgcatcatgacgatatactcattatccttctctatgttgacaaagctcaatttcacattgttcctatcttttacgataaaacgagtgggagcgttaccatgagagcgaggtcattccaacaaaacggaattaaaagctaatcaaatacaatggtcatgcatttgtaatgaaatacattgactagaaaagtgtggtgtccatattgaaagatgtttcgatttcatctttggaaaatatgaaattaaaagagctgtatgagttagcaaaaaaatacaaaatctcttattacagcaaactaacaaaaaaagaattaatttttgccatcttaaaggcgaacgctgagcaagaggatctcttatttatggaaggggttcttgaaattattcagtctgagggatttggtttcttaagaccaattaactattctccaagttctgaagacatttatatttcagcttcacaaatcagacgctttgatttacgaaacggagataaggtgtctggaaaggtacgacctccaaaagagaatgaacgctactatggcctccttcatgtagaagcggtaaatggggacgacccagaatcagctaaggaacgtgttcactttcctgcactcacgccgctattccctgatcgtcaaatgattcttgaaacacagcctaatcacctgtctactagaattatggatatgatggcgccagttgggtttgggcagcgtggtttaattgttgcaccgcctaaggctgggaaaaccattttgctcaaagaaattgccaacagcatttctgaaaatcacccagagtcagagctgattgtccttttgatagacgaacgcccggaggaagtaacagatatcgaacgttctgttgcaggggatgttgttagttcaacctttgacgaagtaccggaaaaccacattaaagtagcagagcttgtattagagcgtgccatgcgtcttgttgaacataagaaagatgtcatcatcttaatggacagcatcacaaggcttgctcgtgcatacaaccttgtcatcccgccaagcggccgaacgctttccggcggtattgatccagcggccttccaccgtccaaaacgcttctttggtgctgcgcgtaacattgaagaaggcggaagcttgacgattttagccactgcgcttgtggatacgggatcacgtatggatgatgtgatttatgaggagtttaagggaacggggaacatggagcttcatttggaccgatctcttgcagaaagaagaattttcccagcgatcgacattcgtcgttctggtacgagaaaagaagaactgcttgtaccaaaagagcatcttgaccgtctatgggcgatgagaaaatcgatgtcagatacacctgactttgctgagaagttcatgcgcaaaatgagaaaaacaaagacaaaccaagaatttttcgatattttaacgcaagaatggaaacaagcgaacatgtctgcatcaagaagatagcttgttgaaaaaatacatttgcaatcatagactcacactgttataatttcatcatgtgcgtttcagaatttattctgagatattaactctgtttccgaattggattcagggcggaaggagatgacagtagatgaaaacaggaattcatcctaactacaaaaaagctacagtcaaatgcgcttgtggaaatgagtttgaaactggatcagtaaaagaagaggtacgcatcgagatttgctctgagtgccatcctttctatacaggccgtcaaaaattcgcttctgctgatggacgtgttgaccgctttaacaaaaaatacggtcttaagtaataatagatacaataaacaggcaggaatccgttcttgcctgtttttttacgtggattgatggaactttaaaacgggggagaagaccttatgtatgtgatgaaacaaagcggttggcttgaagtcatctgcggaagtatgttttctggaaagtcggaagaattgattcggagagccaaaagagccacctttgccaaacaagaagtaaaaatattcaaaccagcgattgataaccgatatagtacaagctcagttgtctcacataacggttcatcagtcgatgggattgcagtagcctcaccaaaagacataataacgcacatatcagaaagaaccgatgtcattggcattgatgaggtgcaattttttgatgagacaatcattgacattgtcactcaattggctgataaaggttaccgagtcattgttgcaggccttgatcaagatttcagaggagagccatttggtgttgttccgcatttaatggcatgtgcagagcttgtaacaaaacttcaagcagtttgttcggtatgcggctccccagcgagtagaacacaacgcttgatcgacggtaaacccgcatcctatgatgatcccattattttagtaggtgcgcaggaatcatacgaagcacgatgcagacatcaccatgaagtaccaagacttgacgttggtacaacacttgacaattaaaaaaatagcaaatgccgctgtgtttcgtttttcgagattttggctgaacacccatcatttgtacttaaataaattaaataacgctacgaaaaaattatctaattttcaacgcttgcgttttagcataagcaggcataaaatgactaactgtagtgtaaagcattttaacgaaaagttcgatttcttgtcataatttttttgattaaggattttcctccttaatcgttctttaaattaatagttcactttatttatattttagaaagagggtagtttttgatgaacaacgtgaagaaaacaaaagaagggtacctcgaaaccactttgtcaggtaaagatgtattatcgattccaacgttgaacaaaggcgttgctttctctgaagaagaaagacaagagcttggactagaaggcttacttcctccaactgttctcactctagaacaacaagcggagagagcgtacaagcaatttctggcacagccagatcgtcttcgtcaaaacgtatacttaagtgatttgcaaaaccgtaacgaagtattgttctataagcttctaacagacaagcttcgtgaaatgcttcctgttgtgtacacaccaactgttggtgaagcgattcaagaatacagccatgaatacagaagacctcatggtgtctatctttcaatcgacaacattgacggcattgagaaagcatttgaaaacttacatgcaacagcaggagatattgaccttatcgttgcaactgactctgagagcattcttggaattggtgactggggtgttggtggtatcaacatcgcaatcggtaaattagctgtttacacggctgcagcaggtattgatccaagccgcgtaattccagtcgtattagatgttggcacaaacaatgaaaaattattgaatgatccattatacatcggaaaccatcacaaacgtgtacaaggtgaaaaatacgaagaattcattgatgcttatgtaaaagcagcgcttaaattcttcccgaaagccttacttcactgggaagaccttggaaacaaaaatgcgcgtaacatcatgaaaaaatacaatgataacatcttaacgttcaatgatgatattcaaggtactggtgccattactttagcgggtgttcttgcagctgtcaagaaaactggtactcaattgaaagatcaccgtgttgtcattttcggagctggatcagctggtatcggaatcgcagatcaagtgcgtgacgcaatggtccttgaaggtctaacggaagaagaagccaacaatgcattctggacattagactacagaggtttgctaacagatcaatttgaagatgaagtgcttgatttccaaaaaccataccttcgttcttctgctgaagtagaaggctgggcacgcgatgaaaaaggacaaatctcatttgctgaaactgttcgccaagcgaagccaacaatccttatcggtacatcaggtcaaggcggtgcattcactgaagaaatcattaaagaaatggcagctcatacagagcgtccagtgatcatgccaatgtctaatccaacaccacttgctgaagcagtgccagaggatctattcaaatggacagacggccgtgcactgattgcgacaggaagcccgttcgaaaacgttgagtataacggaatcgaatatgaaatcggacaatcaaacaatgcgttcgttttccctggacttggtcttggttcgatcgtaacagaatcaaaaatcatcacaaaagccatgttcgtcgcttctgcgaatgcaattgctgaaatggttgatcatgagaaaccaggtgctggtctactgccaagcattgataaattgcaagaagtgtcaatccatgtggctgttgaagtagcgaaagcagctattgaagatggtgtcgcaagaaaaacgcctgacaacatcgaacaagctgtgaaagatgcaatgtggattcctgaatataaaaaaattgtaagagcataataaaaagtgtaacgcggcattgtttcgggtaatctaagcaatgccgcaataaaataagagacatgtaaaagattcaaggaggaatagtaagatggactttttaaatattttgatcctcctagcaccgatttttttcgttatcgcgctgggttggttcgcagggaacttcggcagctatgacgctaaatctgcaaaaggtgtaagtacacttgttacaaagtatgctttgccagcgcactttatcgccagcattctgtcaacaccaaaagataaattctatagtcaaattccatttttcattgcattgattttcggaatcgttggtttttatatcattatccttttagttacgaaatttgcttttaaatatgatttaacagattcatctgttttctcgttaaactcagcacaaccgacctttgcatttatggggattccggtcttgggcagtttatttggggctcaagaagttgcaattccgattgctattaccggaatagttgtaaatgcattgcttgatccaattgccattattgtgtcaactgtcggtgaaaaaacaaaaggaaaagccaaagacggcgaaagtttcctaaaaatgacaacaaaagcgattttgcacggtttatcagagccgcttgcacttgcaccgctagcaagtatcattcttgtccttttaggatttaaacttcctgaaatcggacatgaaatgttagaggaaatcggaagtgtgacatcaggggttgcgctattcgcagtcggtgtcactgtaggtattcgaaaaattaaactaagcttaccagcatttagtattgcactattaaaagtagctgtacaaccgctacttatgtatcttattgccgttcttatgggtctttcggctgacgaaattacaaaagctgtattgcttgttgccttcccaggttcagctgttgcagcgatgatcgcaacacgatttgagaaacaagaggcagaaactgcatccgcatttgtgatcagtgccatcatgtcactcataacattaccgatcattattgcacttaccgtataatatagtagaaggctgcctcatgaggcagcctttcttagcgaaatgaatgaaacagagggaagagcacacgcttttttttgatgtcagggtgtgtgatttcctttttttcttctatttgagagggttgtttcaagctcgcggcaagacgctcaagtttagtggtgagatcttcaatttctctgcggtgctgaagcagctggtatgatacaccttcatctgcttttttagccagtttccgttcgagttcttgcagtcgattttctacatcagtgacatgcaattgctgctgaatgagctgtttcacttgcttttctaatgcttcaatccgccttgtggaggcatcagtttctgcagcaggtgataactgttgaacggtttcctcgtggattggcagtcgaatgtcttggaggatcacaccttcactcatttggtgtttgacttctttgagcagctgtacaatatcttcatgaaattcataatgtccaagttcattccgggcgacagggatgttgagctgtttaacccaacgctgaatcgtttttgaagaaacgccaatttcttttgcaacctcatttgtattcaaaccaaatgccctcccttttttcaattataagtaccattctcttcaaggaggacctgttccttcacgttagacaaaacaagtaaccaatcgccaaagatcgtgttttctagcgaaaaattgcagaaaatcaattgttttggaaatttttttgactgtcataccccgctatactataattagactgttacgcacaaaacagaggtgaagaccatgttagaccgtttaaaatcaattgaagaacgctatgaaaagctaaatgaatatttaagtgatcctgaagtggtgaacgaccctaagaagcttcgtgaatattcgaaggaacaatctgatattcaagaaactgttgaggtatatagacaatatcgtgcggcatacgaccagttaagtgaagcgaaagcaatgctggaagagaagctggatgccgagatgcgcgacatggtcaaagaagaaatttcagagctcacagaggaaacggaacgtttagaagacgagctgaaaatcttgctgatcccgaaagatccgaatgacaataaaaacgttattgtggaggttcgtggtgctgcaggaggagaagaggccgcgctttttgctggaaacctttaccgtatgtacagccgttatgctgaaatgcaaggctggaaaacagaagtaatggaagcgagtgtgactggaactggcggttataaagagattatctttatgatcagcgggaaaggcgcatactccaaactaaagtttgaaaacggcgcacaccgcgtgcagcgtgttccggaaacagaatcaggcggacggattcatacatcaacagcgacagttgctgtcttgcctgaggctgaagaagttgaaattgatatccatgaaaaagacatccgtgtagatactttcacatcaagcggacctggcggacaaagtgtcaatacgaccatgtctgctgttcgattaactcaccttccaacaggtgtggttgtatcctgtcaggatgagaagtcgcaaatcaaaaacaaagaaaaagccatgaaagtgttacgtgcgagaatttatgataaattccagcgtgaagcacaggctgaatatgatcaaacgcgtaaatctgctgttggaacaggggatcgttcagagcgtatccgtacgtacaatttcccgcaaaaccgtgtaacggaccaccgcatcggattgacgattcaaaagcttgatcaaattttagagggaaaacttgacgaggtcatagatgcattaattatggaagaccaagcaagaaagcttcaaaatgcaaaataatcagcgaaccatctttgaagcccttaaatgggcttcttctttgttaacggaagccggtagagaccaaaacgcagcagagctccttttgatgcatgtactgggcctaagcagaagtgaacttcttgcacgttttcatgatctgctgccagaggagcaagatcggttgttcagcgagtttgtcacgcagcataagaaaggcgtgcctgttcagcatctaacgggtattgaattcttttacggccgtcccttcgaggtgaacaaacatgttctcattcctcgtcctgaaacggaagaggtcgttttggcggcgctgaatctggtgagtgacgtcttcccgcacgatcagccgctcaaagctgtggacgttggcacaggaagcggggcaattgcgattacgctggctcttgaaaaagaaacattatctgtcacagcaacggatatttcacatgaagcacttgcggtagcaaagcggaatcaacaagcgcttggtgcagacgtccattttttacaaggtgacttactcgaacctatcatggatcaaggcatcaaagtggatctgtttatttccaatccaccttatattgcagcagaagaaatggacagtttgtcagaggtggttacaaagcatgagccagtgaatgcgctgacagatggacgtgatggtctgtggttttacaagcgtctcattcgtgatcttcactgggtacttcatgagcaggcggtcgttgtctttgaaattggacatacgcaagggcaagatgtaaaagcacatctcttgcagtcatttcccgcggcagatgtccgcatcgtcaaggacataaacgggaaagaccgagctgtttgcgcacacattcaaaacggaaagtccggctgaaaaaagtcggactattttattatgtaaagatgaaacttatggtaaaagagaaacgtatatatagaagaatgaacattctgatcatgatttttttacataaatttgttttgaaggagcgaatggtgtgaacagaaggtatgcgatggtgttggtcatcgtcagtgtactattgattgtgagtgcttgtggtaaaccgagctttaaaaaagaagcagcagcatttggagaaagctataaaaaagcacaatacacagtgaatcgaacagatgacctaactgacatgaaggagaagctgaagttttatttaactgagcatgaatatcaagaatatacacaagacagcatgttcccgagcgtgttagaagcagcaaaggatcaagattgtcaaattaagctgaagaaaattacgtttacgccttcagatgaaagcgatgacagaattgaatttgactatgaaatgatgattcaatttattgatcaaaaaggaaaggttaaaaaagaaatcaagaaaaaaggagcaatgactgtcatcaaaacagaatcagggttaaaaatcagccgagattgggatgggagactgtacccttccgattaccaatcctcactccaaagccgttcttaatgggacggctttttttgatttgacttataatctattaaaaaaatcattttgtctgtttatgagatgggtttcctggacacaatgtttgtagcgaagagaaaaagtggggggaacacatcatgtttaaaagtaaaatgatgatttgtctttatatgtttctattattatgcggagcttttgcaaaccttggaagggaggagacagcggctgcttctgcaaatcagcctgttgtaataccagacgaagcgatccgcttacgcattttagcaaatagcgatcgttcagcggatcaggatgtgaaaagaagcattcgtgacgaggtcaatgccaatatgacagagtgggttaaagacctcacgtccattgaagaagcaagacgtgtaattcggaccaagctgccagaaatcaatcgtattgccaaagcgaaattgaaggaacagcacattgatcaatccgtctcagtcagctttcaaaaagcctcatttccaacaaagctatatgggaatttcgtctatcctgcaggggaatatgaagccattttaattacacttggagaaggggatggagccaattggtggtgtgtgttattcccgccgctctgctttatcgatttttcaaatggagaagccatcgcatcgccagagggggatgaggataaccaagtgacagcgcagcaaacagatgagtctgttaatgaagtggtgaaagaagagaaagaagagaccggtgaagtgaaattttttttattcgaatgggtctctagtcttttctcctaaaaaaggtataaatctgtttttgcctcatagagttgaagtaagagatcaaaaagaggtgaaagcatgtattatcaattaagaatagccacagaagaagatgccccagcgatcaatgcttttcttgaaaagggacaagcgaaaggcggcgtcacgcttgcagagcgtacgacatttgttgtcatggaagatgcggacggtcagctggcggggtgtttaggtcttgaacagcttagtgaacaagagggcttgctgcggtcccttgtcatatcagataaactaggtcagggacacatcgtgtctttgttccaaagtgttcaaacgctcggaggaaaaataggcgtggatactttttatgtcgtcgcaaaccactcctcctcacatgactttttggcattgatgggcttcacgccattagaggacattccagaaagcatgtgggtatctgcacatgcaaaagagatattggcgaaagaacaagctgtggttcttcataaaaaaggaagttaatcacaacatactggacttatacacatacttatccactgttaaacaagcgttatccacaaattgtggacaacgcttgttttattgatcatcatcttttatactttcaaaaggataattgagatatatcaacagttttatcttttttaaaaggagtttgtatgatgttaaatacaaaaaggtggtctgtggatttagaaaagagtttatccacatactatccacaaattgaacaggcagctgtgttattgcagcaaaacgaagtggtcgcttttccgacagagactgtttacggactaggggcaaatgcgaaagagacagaagctgtcatgaaaatatatgaagcgaaagggcgtccaagtgataatccattgattgtccacattgcggaggttcagcagcttcacgaatttgcgcaaatagaaagtgaaaaagcaaaggcgctgatggaagccttttggccgggcgctttaaccattgttcttccgtgtaagccgggtgctttatcaaagcaggtcacagcaggtttatccacggtcggtgtgagaatgcctgaccatccgattgcgcttgagctcatccgagcagctggtctgccgattgccgcaccaagtgccaaccgttcaggaaaaccttcaccgacacaagctgaccatgtagcgagtgatctcgatggaagaatcgctggaattgtcgatggcggttcaactggaattggcgttgagtcaacggttgtatcctgtgtcgacgagtttccagtgatcttaaggcctggcgggattacaaaagaagctttagaagaggtagttggagcggtcagtgtcgacccggggctgacaaaaaaggacgaagcgcctgtatcgccaggaatgaaatacacacactatgcacctgaagctcaaatgtatcttttttctggaagtgatgaagagatgcagcatcacattcaaacataccaggcagaaggtctaaaagtgggcgtgctgacaacagaagaaaagaaatcgttgtttgcggcagatgttgttttcagctgtggatggagagggaaacctgaaacgattgcggcaaacttatatcgtgtactgagacaatttgatgagacagatgtagatgtcattatttcagaagccttttcagagcagggagtgggttcagcgatcatgaaccgtctgcaaaaagcggcaggagggcgtaccctctcttcgttcaaatagttctaacccttcttggacaaacataggttaaaggagaatgcgtgtccaagggggatttacatgtacgaactagctggcgaattgctgacgctcagcatcatggcttttgcactgggaatggatgctttttcggttggacttggcatggggatggttcagctgaggttccgccagatcatttatattggacttgtcattgggatatttcatatgtttatgccgctttttggtatgctgacaggtcagctcctatcaggctggctcggtctccttgccacctatatcggcggggcgctgcttttggtgctcgggctgcaaatgatcgttgcgtctattcgcaaagaggataaaccatttatcgcacctgttggggctggtctcgttctttttgcaacaagtgtcagcttagacagtttttccgttggtttaagtctcggaatttacggttctcacgtgtggatgaccattttattgtttggtttttttagtatgatcctcacatggcttggattattactcggtaaacaggttcgatcatgggttggatcatatagcggggcgcttggcggaatcattttactagcctttggtatcaaattattatttccgctctagtcagtctccttacataacatgtagaatgaaatgctatataatagaagaaaaggagggcgaaagatgaaaatcttatttgtttgtacgggaaatacatgcagaagtcctatggctcaagccctttttgcttcaattgcacatgataaaggtttagaggtcactgttaaatcagcgggcatttttgcctcagatgctgggaaggcttctcctcaagcggtcgaagcattatttgagaaaagcattccactgaaccattcttcatcaaaactgacagaggatcttctgcgagaagcagattacgtcttcaccatgaccatgcagcataaacagttgattgtggagcaatatgcgcatgcaaaagacaagatcttcactctaaaggaatttgcgacaggaacagaaggcgatgtatccgatccgtttggaggaagtctgtctgtttatcaggaaacacgtgatgaacttgaagcattgctctttcaactggctgagagattgaaaaaagatcagacatcctcataatggacaacctgtaaaaccgttgcgtcaacggtttttctgcttttgtttgcaaatgactaggcagaggttaaaatataactataaataaagaataaatgtaaggcatgacagatcaactcacccttaggaggaattgcccgatgaaagtagccattgcatccgatcacggcggaatgaatattcgtgaagaaatcaaacaactgatggatgaattgaagattgaatacattgatatgggttgtgaatgtggatcaggttctgtagactacccagattatgcttttcctgtagctaatatggtggcaaacggagaagtcgaccgcggcattttaatttgcgggacaggcatcggtatgagcatctcagcaaacaaagtgaaaggaattcgctgtgcgctggcgcatgatacatttagtgcgaaagcgactagagaacataatgatacaaacgtccttgcgatgggagagcgagttattggacctggattagcacgtgagattgcgcacatttggctgacaacagaatttacggcagggcgacatgctgtgcggattggtaaaatcgctgattacgaagaaaagcacctataaggagcgcttaacatgaacattggtcaagattggcttgaaatgttaaaagagtttcatcaaatggtcgaactgcgtgctggacaaattttagtcatcggctgcagtacatcggaagtggctggcgagcatattggtacagcaggaagtgagcaaattgctgcgtctatctatcaagaattggatcagctaagacgagagactggcattgagctcgctttccagtgctgtgagcatctgaatcgtgctcttgttgtggaagaagaagtggctttccggcttaacctagagattgtagcggcagtacctgtccgaaaggcgggtggttcgatggcggctcatgcgtatcagcacatggaacatcctgtgttagttgaatccatcgaggcgcatgctggaatcgatatcggtgatacattgattgggatgcatctaaagagagtcgctgtacctgttcgcctcagtcgtcatcaattaggacatgcacatgtgacgtttgcgaaaacgcgtccgaagctgattggcggagaacgagcggtttatacaagatcatagcttagatatatttctaatataatgttgaatgatgaagacgcttcaccgcttgaatattcggtttttcgcaaaaaaagaagtcgatttcccaaaaaaacttttacatttcactcaaaaaccgtgtacaatgagatggtgaaaacatcgaatggaaatagattggagaggatttcgctgatgaaacatttacctgagcaagacgcacaagtattcaaggcaattcaactagagcggaaacgccagcaggacaaaattgaattaattgcatcagaaaactttgtaagcgaagcagtcatggaagcacagggctctgtattaacaaacaaatatgcagagggctaccctggtaaacgctactatggcggctgtgaacatgtagacgttgtagaagatatcgcacgtgaccgcgcaaaagaaatttttggtgctgagtatgtgaacgtacagcctcactcaggtgctcaagcgaatatggccgtatactttaccattcttgagcatggcgatacagtgctaggtatgaacttatcacatggcgggcatttaacgcacggaagccctgtcaactttagtggtgtacagtacaactttgtagaatatggtgtcgataaagaaacgcagcatatcgactaccaagatgtacttgaaaaagcacgtgaacataagccaaagctaattgtagcaggtgcaagtgcatacccacgtcaaattgatttcaaaaagttccgtgagattgcggatgaagtcggtgcttactttatggtcgacatggctcacattgcgggtcttgttgcagtaggtcttcatccaaatccagttccatatgcagattttgtgacaacgacaactcacaaaacattgcgtggacctcgcggcggaatgatcctatgccgtgaagagtttggtaaaaagatcgacaaatcgatcttccctggtattcaaggtggaccactgatgcatgtcatctctgcaaaagctgtttctttcggtgaagtattgaacggagatttcaaaacatatgcacaaaacgtcattgataatgcaaagcagctagctgaaaccctgttatctgaaaatattcaacttgtatctggtggaacggataaccatcttgttctcatcgacttgcgttctcttggcatcacaggaaaaattgcagaaaatgttcttgatgaaatcggtattacagtgaacaaaaatgcgattccttatgatccagaaaaaccttttgtcacaagtggtgtacgtgttggtacagcagcagtgacaagccgcggtttcgatcaagaggcgatgaaagaagtcggttccattattgcgcttgctctaaaacatcatgaagatgaagcgaaattagaagaagcgaaaaagcgtgtatctgatctaactgcccgcttccctctatataacgaattagattattaaaaagcagacccatttgcctattattggcatgtgggttttttttgtaggatttgcgaatcatattgaaagatgacgtctttttatgtagaattgtaggaagtgtgcaaagttcaccggaagatgacagaaaaggagttgtagcaagcaatggcaaaggtttatgtatttgatcacccgcttattcagcacaaacttacatatattcgtgacgttcatacaggaacaaaagaatttagagagctagtggatgaagtcgcaacattaatggcatttgaaatcacaagagacttaccgcttgaagaggtagatgtagaaacacctgtacaagtagccaaatcaaacgtgatctcagggaagaaactcggtgttgtgccaattttaagagcaggtcttggaatggtggacgggattttgaaactcattccagctgctaaagtgggacatgtcggtttataccgtgatccgaaaacattaaagcctgttgaatattatgtgaagcttccatctgatgtggaagagcgtgaatttatcgtagtagatccaatgcttgcaactggcggttcagcagtcgaagcattgaacagcttgaaaaaacgcggggcgaaaaacattcgcttcatgtgtctgattgctgcccctgaaggtgtagaagaaatgcaaaagcatcatcctgatgttgatatctacattgcagcattagatgagaaattgaacgaaaaaggctacattatcccaggtcttggtgatgctggtgaccgtatgtatggaacgaaataacatgttttaataaaagcccacatgcaaacgtgcatgtgggctttttgaaatatatgacaaacggttgatatcgttcttagaaaaatcaatgtatactgaacattagctgtttttttcaatgaatgtcacgtgtctcctaaagtttgatgaaattgtgaacattttgtgtgctctatcactatagaaaagttttttaactttcaacggattgacacatcatagacgctattgtatgctaaacgagggtattatggtaaggttttcatagcctatagcactctactaatcctcattgtgaaccctttaattatcagggtttgtatcagcgaatgaagcaacatcccatagatctttagatttcaagtctgattgtgcaattagaccgatgggtgattgatttttttcgaacaggactgcttatcataagcgtcttctacgcagttttcatcaccatttatcaccttttttacaatatttttcatcgggagtcagatgaatgaacgatccaaacgcgattttccgcagacagagtaaatatatgttctatctattggcaatttttgtgtttggctatgccatgcctggttttaaaccactgtttcttggtttcattatcggcacaatttttgctttctttaatttattcctacttatacggagaatgcacgcttttgatcgagcggttaaaaaaggaaaatccattcgttcaatgggaagtacagccaggtgggccaacgcaattctcgcagtagcgattgcttggcgttaccctaatgaagttcatctggcaggtgttgttataggattaatgacaatatatcctgtcattatgatagattccttcattcaacttaaacgttctactatggaagagaggtgaatactctttgggtcacagttcaaaaactacagaatttttagggttaacgttcaacttatccaatgttctcatgattacgattgctagtatcatcgttcttctcatagcggtgctgactactcgtgttctgtctattcgtccgacaaaggcgcagaacttcatggaatggattgttgattttgttcgaaatatcataggtagttcgatggacatgaaaacaggagccccatttctagcgcttggcgttacattactcatgtacatatttgtttcaaacatgcttggactgccattctcgattacggtcgatcacaacttgtggtggaaatcaccaacagcagaccctgcaatcacaatgacactagcgattatggtcatgggattgacacattactacggtgtcaaggcaaaaggagtcaaggaatatacgaaagactacttcagaccaattccgcttttagtaccattgaaacttattgaagaatttgcaaacacgctaacacttggtttgcgtctttatggaaacatttttgctggagagattcttcttggtttgcttgcaggacttgcgaccaatttctacacgcaaaacattgcacttggtatcgttggtacattaggtgccatcgtgccgatgattgtatggcaggcattcagtttgtttgtcggaacaatccaagcatttatcttcaccatgctgacaatggtgtacatttcccataaagtcagcgatgaacactaaaaaattgagagtccaaaaaggacgttattttaaaggaggagctttttaatgaatttaatagcagcagcaattgcaatcggtttgggagcactaggagcaggtattggtaacggtctaatcgtatctaaaacagttgaaggaatcgctcgtcagccagaagctggtagagaactaagaacacttatgttcatcggggtcgctttagttgaggcacttccaattatcgctgtcgttatcgcattcttggcattctttggttaatatgtgagaagcgttctaatatgaattttaatggcgaagatcagattagttcgaaacttcgccattcctttatgttttgtttcttaacatattatttaaagaagggagttgccgtactaaatgtctcagttaccagtggttttaggagcaggtggcttaagtttcaacgccggggatatgttattccagcttatcgctatgctcatcctgcttgcacttttaaagaaatttgcgcttaaacctttattaggtattatgaagcagcgtgaagattatataggaaatgaaatttcaagtgctgaacaaaagcacgttcaagctgaaaagcttcttgaagaacaacgtgtcttattgaaagaagcacgcgaagaatcacatacactcatcgaaaatgcgaaaaagattggtgagaaacaaaaagaagagatcattcaagcagcacgtcaagagtcagagcgcttgaaagagtctgctagaactgaaatcgtgaaagaaaaagaacaagctgtggctgcactgcgtgagcaggttgcatcactatctgtactcattgcatctaaagtgattgaaagagaacttgatgagcaagcacaagagaaattgattcaagagtatcttaaagaggcaggcgaaagccgatgagcgtgactattgtctctaagcgttacgcttctgctctttttgacatcgttcttgcttcttcggcagtagacgaaactgaaaaagagctgaatgagatcaaaaaagttctaaaggctgaccaagaattgaatgactttcttgttcatccaaagattacggcagacaaaaagaaacatttgattgcagaagctttcaaaggtgtttcgacacatgtattgcacatcatgtatttattgattgaccgcggacgcacgaatattttctctgaaatgacgtctgagtttgtgaaacttgcaaaccgcacgaaacaaatagacgatgcggtcgtgtattcagtgaaaccgctgagcggcgctgaaattcaatctttatctgaagtatttgccaaaaaagccggagtcacatcactgcgtgttgaaaatgtgattgacaaggatctaataggcggagtgaaaatccgtatcggaaaccgcatttatgacggcagtgtcagcggaaagctttcccgcattgaacgtcagcttgcaggcgaaaatcgttagaaggggtgaaaccttagtgagtatcaaagctgaagagattagcgcgctgataaagcagcaaatccaaaactatcaatctgaaattgaagtaaaagatgtcggtacagtcattcaagtaggggacggtatcgcgcgtgtacatggccttgacaacattatggcaggagagctggttgagttctctaacggtgtaatgggtatggctcaaaaccttgaggagtctaacgtaggtatcgtgattttaggaccttacaaagatatccgtgaaggtgacgatgtaaaacgtacaggtcgtatcatggaggttccagtaggtgaagaattaatcggacgtattgtgaacccacttggtcagcctgttgatggactaggtccaatcttaacgagcaaaactcgtccaatcgaaagtgaagcaccaggcgttatggatcgtaaatctgtacatgagccgcttcaaacagggattaaagcaattgatgccttgattccaatcggacgcggacagcgtgaattgatcattggtgaccgtcaaacaggtaaaacatctgttgcaattgatacgatcctaaaccaaaaagatcaagacatgatctgtatttatgtagcgatcggacaaaaggaatcaacggttcgtggtgttgttgaaacacttcgtaagcatggtgcgcttgattacacaatcgtagtcacagcttctgcatcacagccagccccgcttctttaccttgctccttatgcaggtgtaacgatgggtgaggaattcatgtataacggcaagcacgtacttgttgtatatgatgacctttctaaacaagcggcagcttaccgtgagctttcattattgcttcgtcgtcctccaggtcgtgaggcattccctggtgatgttttctatcttcactctcgtttattagagcgtgcagcgaagcttagtgacgaaaagggtggcggttctatcacagcattgcctttcgtagaaacgcaagctggcgatatctctgcatatatcccaacaaacgttatttcaatcacagatggacagattttcttacaatctgatctcttcttctcaggcgtacgtccagcagtaaacgcaggattgtctgtatctcgtgtaggtggttctgcacaaatcaaagcgatgaaaaaggtagcaggtacacttcgtctggatcttgcttcttatcgtgagcttgaagcattcgctcagtttggatctgatctagaccaagcgactcaagcaaaattaaaccgtggtgctagaacagttgaagtcttaaaacaagacttgaacaaaccgcttaaagttgaaaaacaagtagcgattctttatgcacttacaagaggatacttagacgatgtcgcgattgctgatgtcaaacgttttgaagctgagttattcatgtacattgaagaaaaccataaagacttgtttgacaccatctctcaaacaggaaacatgcctgctgatgaagagtggaatacagcaatcgaaggctttaaacgtacgtttgcaccaagcaactaattagtaatctttccgagagaaaaagattctctttttctctcttttcacgtaaatgaacacggattcctgaaaaaaggtggtgaaatctttggcctcattacgcgatataaagtcaaggatcacgtcaacgaaaaaatcgagtcagatcacaaaagcgatgcaaatggtatcagctgcgaaactgaatcgtgctgaaaacaatgcgaagtcttttgttccttacatggagaaaatccaggaagtggttgctgcaatcgcaactggaacaagtgctaagcacccaatgcttctttcaagacctgtcaagaaaacagggtatctcgtcattacatctgatcgggggcttgcaggaccttttaacagctcgattttgcgtgccgcttaccaaaccattcaatctcgtcatcaatccgctgatgaatatgcggtgattgtgattggtaaaatcggacgcgacttcttcaaaaagcgcggtattccagttatttctgaagtaacagggcttggagacgaagtagcgtttgctgatattaaagaattagcaagcagtacagttcaaatgttctctgatgaagcgtttgacgaactttacatgttctacaaccactttgtcagtgccatttcacaagaagtaacagagaagaaattattgccgctaacggacctttcggccgtagcgacaccaaataaacgttccgcatcttatgagtttgagccttctgaagaagaaattcttgaagttctccttcctcaatatgcagagagtttgattttcggtgcgcttcttgacagcaaagcaagtgaacatgctgcaaggatgacagcaatgaagagtgcaacagacaacgcaaaagaattgatcgacaacctgacactctcttataaccgtgctcgtcaagcagcgattacacaagagattacagaaattgtcggcggagcagctgccttagaatagaaataattgtcaggagggaatgcaatgaaaacaggacgcatcagtcagatcatgggaccagtcgtagacgttcattttgaagacggtcacttgcctgagatttataatgcgatcagagtttcgcataaagcggaaagcgaaagtgaagttactatcgacttaactttagaagtagcactacatttaggtgataatacagtcagaaccatcgcaatggcatcaacagacggtgtgaagcgcggtatggaagctgtagaccttggaaaaccaatttcagtaccagttggtaacgtaacacttggacgtgtattcaacgtactgggagataacattgacttagatgagcctcttggtgtggaagctcaaagagatccaatccacagacaagcgccttcttttgatcaactttctacagaagttgaaattcttgaaacaggtatcaaagttgttgaccttcttgctccttacatcaagggtggaaagatcggtctattcggtggagccggtgtaggtaaaaccgttctgattcaagaattgatcaacaacatcgcacaagaacacggcggtatttctgtattcgctggtgttggagagcgtacacgtgaaggaaacgacctttactacgaaatgaaagattctggcgttatcgaaaaaacagccatggtcttcggtcaaatgaacgagccgccaggtgcacgtatgcgtgttgccctaactggtttgacaatggcagagcatttccgtgatgaactaggtcaagacgtattgttcttcatcgataatatctatcgttttacacaagcaggctctgaagtatcagctctacttggacgtatgccttcagcggtaggttatcagccgacacttgcaacagaaatgggtcagctgcaagagcgtatcacgtctacaaacgtaggatcggttacatcgattcaagcgatctatgtacctgcggatgactatacggatccagctccagcaacaacgttcgctcaccttgatgcaacgacaaaccttgagcgtaagctgactgaaatgggtatttacccagcggttgatcctcttgcttcaacatctcgtgcacttgcacctgagatcgttggtgaagagcattatgccattgcgcgtgaagtgcagcaaacattgcagcgttataaagaactacaagatatcattgccattttaggtatggatgaattatctgaggacgataagcttgtggtacacagagcacgtcgtgttcaattcttcctatctcaaaacttccacgtagcagagcagttcactggccaaaaaggttcttatgtgccattgaaagaaactgttaaaggcttcaaggaaatcttatctggtaaatacgatcaccttccagaagatgcattccgcttagttggacgcattgaagaagtggttgaaaaagccaaagagatgggtgtagaggcctaatctggtccttaggagggtaaaagcatgaagaccgttcaagtcaatatcgttactcccgacggcccagtgtatgaagcggatgtggaaatggtcagtgtcagagcagaaagcggtgagcttggtattttagctggccacgttccaatggttgctccgctaaaaatcggtgcagttcgcttaaaacatagtggatcaactgaattggttgcagtaagtggcggatttgttgaagttcgccctgaacaagtaaccattcttgctcaggccgctgaaacatcagataaagttgatgtcgatcgtgctaaatcagccaaacagcgtgctgaagagcatttgaaccacccgaatgaaagtgatgtacgccgggcggaactcgcattaaaacgggcgttaaaccgtttaaatgtagcagggaaataaaacagaaaatccttcttatcacaatgataagaaggatttttttagaatgacatgagagattggtacatcgacacatacgggtgagaatcctgtttttcaagatataagtgctcgcaaaactgcgtactatgccacgttttattgtgccggcgcaaaccaagcgtatattgatgcggagagtccatataaggccgcacgacccagtcagcatctgaatgatgacggaggacaacctctcccatatacacactcatcatcgcttctaatgcatctattggcattttccactcagcaaacagctgcttggtaaatgcatcaaagtatagtgattctaactgatacaggctttcctcagaataatccaaagaaatgttatgaaaatgacacaattgcgctaattcttctagctgtgtctgtctataatcaaagtagaaagcaatggcctcccattcatgatcaaatgagggaaccagttctccgtacaaatcaacaaagtcaggaaaagaatctttcaatgtgttcagctccttccacacgcagtatatcatctccctggcaccaggataagaggggatttactctaaatatagctcttttttccaaatgattcatctttccgattttcgaggatataatgaaagggagttttcctttacagaaataaataaaaggaggattcaactgtatggaagacgtaggacaacaagccatcgtgagtattgtgatccacctgttttttattgcggttacatggtgggcattgcttgccgtaaatattgatccactgattaaaaaagggaaaatcgttcaggcaagattgctgatgatgctcattaccattgccatcgcatctgcagtcagcaatttcttccttgattacttaaatttctctagacaaattccttatatgttctaacataaaaggtttggtcactgccttatgcgggaacgtaaaaagaagcgtcaaaagtatggcctttgatgacttttccacgtatgcatagacctccttgcggcaacacttgtagcaagggggaatgacaagtgagaaagtatgtaaaaggttggccattatttgcgtttattcttttttttgttctgatgattcaaggtgttcgtgcggaagaatcttctccgctcgcccaaatagcagaaggtctgaaaaaccagcaaattgaagtagatggatggacccttcacgccaaaacaaatgtagacatttcatccgaacaattttcaaaaaaagtgcaacgtttgaaagacgaactacgacagtatgagtggaccgaaaaagaagagaaacatgtcaccaaagtcacaggaatttacaaagatgaaaaaaatgatactttatcgaaaattttactcgtgaagaccgacacaaaatccaatcaaaagtcgtatttattatatgagcaaaaaggtgctcgcccactgaatacctgggagcatacatatgatcagttcgtacgtcatgcaaaaagcatattacaagagaaatttgtaatttttacttgtctcgatggtcatgtaaatggtatgatggatgttgttttgcaaaaaaaagctgaaacgttagcaaatgaatttcaagcaaaaccagttgagtatctcgttgagtctaattttgtgtcgctttccgcttacacagataagtgggaacagttcattatgacttcaaatgataaaatgaatgttcaaattgccatcagaagttcggaaatgaacgaaaatcatacgattacggttggcacaccaatcgtaacgactgaatattaatatagagaatttgggacgcggaggggaagaccttggaaaaaatcatcgtccgcggcggtcaaaagttaaacggcacagttaaagtagaaggcgcaaaaaatgccgttttaccagttatcgctgcatctttgttagcaagtacagaaaaaagcgtaatttgtgatgtacctacgctctccgatgtatatacaatcaatgaagtgttacgtcatttaggagcagaagtacattttgaaaataacgaagtatcagtggatgcatctcatgcactagaaactgaggctccgtttgagtatgtccgtaaaatgcgagcgtctgtgctcgtcatgggaccacttttagcaagaacaggtcatgcaagagttgcattacctggaggctgtgcgattggttcaagaccaattgaccagcatttaaaaggctttgaagcaatgggagctaaaattcaagtaggaaatggtttcatcgaggctgaagtaaaaggccgtttaaaaggtgcgaaaatctatttggatttcccaagtgtcggtgcaactgaaaacatcatcatggcagcagcattagctgaaggaacaacgattttagaaaacgtagcaaaagaacctgaaattgttgatttggcaaactacatcaatgccatgggcggtaaggttcgcggagctggtactggtacaatcaaaatcgaaggtgtggaaacacttcacggtgcaaaacacaacatcatccctgacagaattgaagcaggtactttcatggtggcagcagctattacagaaggaaatgttcttgtaaagggcgcagtgccagagcacatgacatcacttgtagcaaaaatggaagaaatgggtattcagatcattgaagaagaagaaggtttaagagtcattggaccatctgagctcaagccaatcgatctaaaaacaatgccacatcctggtttcccaacggatatgcaatctcagatgatggcgctattgcttcgtgcgaacggaacaagcatgattacagaaacggtgtttgaaaaccgctttatgcatgctgaagaattccgccgcatgaatggcgatattaaaattgagggtcgctctgtgattatcaacgggccggttcaacttcaaggtgctgaagtatcagcgactgatttaagagcaggagcagcacttgtacttgctggattagtagcagaaggtcatacacgtgtcactgagttgaagcatatcgatcgtggttatgtgaacttccaccagaagcttgcagcaatcggtgcagatattgaaagagtaaacgatgaaacagcagatgtgacacaagaacaagttgtatcagatctgaacgcgtaatcataaagaaatcagtgtgtccatagggcatgctgattttttttagaatcatagaatgctttatttttaaagcttatcattagtgtatccaaccatcttaaattttattcataaagacgaacagtaaaatcagttgataaacagcctcatatcttcatcaaaagacttgtccactgaatgaaagaagctgtcatattagcttgtccccgcccataggataaaagagattcaatgacaaatgggggcagccaaatatgaaaccaatgatatggacaatcgcaggaatatgcatcattattttaatgattccaactttacttgtgttgccgacgtttcaagggaaaccggaggtaagccagcatgtatcagcggagccatcagttaaaaaagaagtgaagggtacagtcaaattgaagcaatcacccgtcgctatccccgtctatcgttcagctcatcagcaggtagaaaacatccccttagaagagtatgtgatcggtgtcgtagcgtctgaaatgccagctgattttgaaatggaagcactcaaggcacaggcactcgctgcaagaacgtatatcgtcagacaaatgatcatcgataagactgtcaaatcaccaaagggctctcttgtagatgacacccaaatgttccaagtttataaaaacaagcaggaactcaagaaaatttgggggaaagcgtacaattggaagttaaaaaaagtcacagaagctgtcgccagcacacaaggaaaagtgctgacttatgatgagaagccaattgatgcctcattcttttcaacaagtaacggaaaaacggaaaatgccgaagcttattggaaaaacgaaatcccatatttgaaaagtgtctcaagtaaatgggacgaaaaatcgccaaaatttcaaaataagaaaaccatcacagttagtgaatttcagcaaaaattaggtgtgacgctcactcagcaggctcaggtaggacagatagtagaacggacgccaggaaatcaagtagcgaaagccgtaataaacggtaaaacactgacaggcagagacattcgagagtcactaggacttcattcagcggactttacatgggaacgacagggccagcaaattatcattacgacaaaagggtatggccatggggttggaatgagtcagtatggtgcgcactatatggcacagtcaggcaaaaaagtagaggctatcgtgaaacattattataaagggattcaaatcgaatcagctgaacgttttctcaacacgtatatggctaaaaaataaagcaaagttgcctcagaaatggggcatctttttttgtgttccaagaggtttgaacagaatgtgtcaatttgcgacttaagacgcacctcaggaaatcttaaacatttacgtcccgacaagaaccgatggccgatacaaagcccctcgaaagaaggagaaaacaaaagaaaaaatgatgtgttaggtgaatatatctagacaactgacagatttttagtgattttgatgaaagagaaaaagggaccgagtcctataccattccaagacagaatattttacgattaagatgtttcaattaaatacataaggaggaaggaaaaatgatgttgaaaaaagtatttacactcgtaaccttagctgtattgacattatctatgtcaatctcttcaccagtatttgcaaaagcatctacagtcaaaaaacataacaaagatgtaagagttactatcttacttgatgcaagtggaagcatggcaagaaaagtagagggagaacgcaaatttgacctcgcaaaacaagaggtatttaaatttgctcagtcacttccaaaagacgctaaaattcgtatgagcttgtttggctctgaaggtaacaacaaaaattcaggtaaagctcaatcatgtgaagtcattagaggcgtttatggcgtacagccttacgaaaaagaaagctttgaaaactctttaaacggacttggaccaaatggctggacaccgattgctcgtgctcttgaaaatgcaaagcaaacggatgaacagcttaatggtggaacaaaacatattgtgtacctaatcactgatggtgaagaaacttgtggcggagatccagtaaaagtagcaaaagaattgcataactcaaaaggatcgactgttgttaatgtgatcggattagactttaacgatggctatgaaggtcaattgaagcaagtagccaaagcgggtaaaggccaatactaccaagcaagcactggtaaagaaatgggttctatcttgtcggcagaatcattaaaactacacgaataacttgctgaacaaaagggaaacgattgatgtatgctatcgtttctctttttctgtacaaatgtaaaagggaggtttttatgaatgaaacgaaatattgtattaaccattttggctagtcttgtcctgcttctttcttcaccagctcatgctgtgacaaaacaggagcctgctcatgtggtgatattacttgatttaagcggcagcatggcacaatcagttgaaggcgaaaagaaaatcgatatcgccaaacgttctattcaaagcttcgcaagtattttatcagaagatacacaagtcctgctacgtgtgtttggtcatgaaggaaccaataaaaatgcaggaaaagcagtttcttgtggaagctctgaagccgtttacggatttggatcatatgagccatcaacatttcagcaagcactgaatgtgtataagccgaccggctggacaccacttgcaaaagcattaacagatacgaaacaagattttgaagatcaccaggctgaaggaaaaaatattgtctatgtcgtcagtgatggtaaagaaacttgtggaggaagcccttcacaagcagcaaaggaattacatgaagacggaattgacaccattgtcaatatcatcggctttgacgtgaatgaaaaagaagcaaaaagtctaaagtctgttgcaaaagcgggtggtggacaatatcaaccggctgcgaatgccgaagaattgaatcacattctacaaaatgaagcgagcgcttttggtcagtaggatatgaatgggagctggggattgttttccccagctgttttttagttgaagatcaattcaaagtagtttctaattcatcaattcgtttctccacgtagtgctgatcttttcttgcatgaaaagtttcggctttttctaatattgccgccgtattatactcgggaatctgtgagtagctctcatacacaccctttggaattaaaacgttcccttcaggccaataaacagcgatattgccacgtttcaactccccgaattgagccactccttgataggacccatattgattaaacaagacaactggatcaccttcttggacataaagttcttttgcatcttcgttattcatcaagatagaatgacgcttcccaccattaaaggcatccttttcactatagatcatggagttgaattgctttcctcttcttgtcgtgatattaaaatgtccttccgtttttcggtattgaggcagctgggcaggaagaagatgtcctttgccgtccggtgttggacactccccgtcttcacatagccatgcgccaccccattgaaaaacgtctcctttatgacgcaaatgctggatgccgtcatagtttcgatttgcgaccgcaatctcacggcgaatgtcttcagccgtttcgaaatgaatcagctcagcatcttctggccggactctttttgcaagatcaatataaatgtcccattctgctctggcttcctcaatacgaggtccttcaatttctggactgaaatataccatgcgttccgtactagttgatgtaccgccgcctggctgttcatatcttgtcatagcaggcagaacaattaccgtctcttctgcctctacaagtgtagaggtattcaaaatgatatcttgatggacacggagttcaagctcagataaagctttttcgatcgcatctggatttggcatcgtttctaaaaagtttccgccgctcgtaaacagcattttgagtttttgcggatgttcttttgggagagccattttctcaaaggattgcccaatggtgtcaccatgccatttcggaatgtcaaacccccaaattttttcgattctttcaatattctcttcatcaaaatcactgcccggcaaaacgaatggatcagcacccatttcaccagaaccttgaacgccgctatgccctcgaattggcatgacaccacaatgtttcctgccaataaatccacgtaacatagcaaggttggcgacctgtgatatattatcagttgcaaagcggtgctgggtaagacccatactccaaataaaaacgcctgaattggcattggcaaggaggatcgcaaattccttcattctttcttttgataagcctgatgatgcttctaggtcctcccacttcaactgtgcggcatgctgctttaaatcctgtatgccggtagtatgggcttgaataaattcatgatcaagagcggaatggggagcatgctgctccatgtcaaaccaatgtttgatgacgccgttcataaacgcaatatcgccgcctatattgacttgatagaaatcatccgcgatttttgtgccgaatagagcactttctggaatagagggaacccagtacttttccatggcaggctctttgtacggattgatgacaataattttggttcctttctttttcgccgcatacatatatttagtggaaacgggctgattgtttgctgcggcagatccccaaaaaattaagacatccgttccgatccaatcgttgtaattacagctggaggctcctataccaagggatcgtttaagagcggttttgctcggtgaatgacaaatgcgagacgcattatcaatatgatttgtcccgataaagcgagctgccttcgcagcggtataatagacttcatttgtaattcctctagccgttaaatagaaagcgagctgccgtttatcaattgatttgattttagctgcgatttgatctaatgcatcatcccaggaaatacgcgtaaaggcattgtcacctttttttcgaatcagtggataaggaatacggccaagtttgcgaagagaggtgctgtccatttgtttgagctgttgaatatcttcgaaccattttggatcaatagctggcattgtattaagacgaagtacatttagtcttgtggtgcatatatgaggtcctgcgagcgtttggtcatataaccctgaaacacccagggcacagccatcacacacgccctgcgttaaaatacgatatgcataggggagattatccttgttttcccatgccactttcatcgtatctcgaatgtgtttcggttttactttcccaagccccataggcgcaaaagaggcccatagctttggtgagggttttttattaagcttaataggccccttatgttttgttttccccatgatatcatcaccctcctattactttatgaagcgttttcatatctaaaaattacctttagattgtgattctgtcaaattcaaattaaggtcgggctgagacagaagaagtagcagtaaggtttgtttctctaagctgttgaatatctttccttatgagaagagatatgataaaagcgatgaaaaataagccagagaacaccatcagactttgcgtgtagttacctgttatatctcgaataaaggatgaaaataaaggtccagctaaaccagcagcggcccaggcagtcagaatataaccgtgtatggcaccaagttgtttcgtgccaaataaatccccaatataggctggaattgaagcaaaccctcctccatagcacgtataaatgatcgccatcacgattgaaaagacgagcggttcttttaaataggggagtaaaggaaaggcaatgagctggatactaaagaagattgtatacgtattcggccttccgatataatctgagaaggatgcccagccaatccgccctaaaccattaaaagcacctaaaataccaacaagggcagctgcagcacctgcagtgaatccaacactttcttgtgcaagaggcgatgcaactgaaataatggcaattccgcatgtgatattaataaagagcatgagccacaaataataaaaacgtcgtgttttgatcgcttcatttgctgtaagctgtgataaatcctgagggatttttctttgatttgtttttaacacgtcaaactgtttgacgtcttcagatgttggtggtgataaataaagagatgagatcaccatgatcataaaataggaaattccaagaatgtaaaaggtatttgcgatgttcactttttcaatgagatattggataattgggctgcaaataagagaagcaaatccaaaacccataatagctaagccggttgcaagtcctcttcggtccggaaaccatttcactaaagttgatacaggtgcaatgtaacctactcctaatcctatcccagcgagtacaccataaaataaatagaggagagggagtgaggacatgtggacagcgaaccctgatcctgtcattccgataccgaagaaaatggctgagaaaagccccgatgctcttggaccatatctttcaacgaaatgccccatgaaagcagcagataatcctaaaaataaaatagcaatactgaaggtcaagcttatttctgtcaatgaccactgaaaagcttgatgtaaaggattcgtaaaaacactccaagcataaacagacccaatagataaatgaattcctacagcacttgttgcaatgagccagcgatttttcgatttgttcattttgttccccccatataaagcaatcaaaaagtttgataagataggaatatgttacaattttatgactttttaaaataatatcataatttgattggatcatataactaaatttgtgctgaaaggaagatcatacaatgaatccttctgttaaaaagaaacgagtcatacaccaatacagtgaaggccaatttacttgcaaaacagatgaagttgtagaagaattccctttaactgtgatcgtgaatggagaggaatttgtgacacttgtttgttcaccagatcatttgaatgaattggttatcggttttttagcttcagaaggagtcattcgatttgaaaatgagattaaaaggtttacaatagatgaaagtatgggctttgcatatgttgatttagttcacccaagcggatttcagtcatcagattttacaaagcgagtgattggttcttgttgtgggaaagggagacacttttattttctccaagatgtgaaaacggcaaaaacagccattgatcgaatcaacatttctgctgaaacctgtatgcatctaatgaagtgtttacaagaagaaagccaattatttcaacatactggtggtgtgcataatgctggactgtgtgacacagagaagctattcatcactagaactgatataggaagacataatgctttagataaaatctatggatactgtttacttcatcgaattccacttagagataaaatccttgtgtttagcggccggatatcgtcagaagttttattgaaggcagcaaaactaggagtgtcgatcgtcatctcaaaatcagcacctactgagctggcgcttaatatggcagaagaattaaatatcacgacagttggattcgtcagaggaaaatcttttaatatctacactcaccatcagcgtattacagaataggaggcaaagtatggacagtatattggataagagacatcgaccattgcgcgatttaagaatatcagtaacagatcgctgtaactttagatgtacgtactgtatgcctgctgaaatttttggaccagattatccttttttgaataaagaagaactgcttagtttcgaagaaattgaacagcttgctaccctttttgcaaaggacttaggtgtggtgaaaatacgcatcacgggtggtgaacctttaatgcgaaaagatttgcctatcttaatagaaaagctctcaaaaattccaggaatcgaagacattgctatgacaaccaatggaacgcttttacctttatatgctgataagttaaagaaagcaggtcttcagagagtcaccattagtttggattcattaaatcctgaccgttttatgcaaatgaacggaaggaatatttctatccaaaaagtgtttgatgggattgaggctgcaaaaaaagctggacttgctattaagatcaatatggttgttcaaaaaggtgtgaatgatcaggatgttttaccaatggcagcttactttaaaaaagaaggacatgttctcagatttatcgagtttatggatgttggaaatacgaacaaatggaatctagagcatgtcatgacaaagaaagagatcattggtctaattgattcaacatttcctatcaaaccagaacctcctcaatatccaggtgaagtagccaaccgattcttttataaagatggttcaggagagataggcattatttcttctgtttcagatgctttttgtggaacatgtaacagagcgaggctttctgctcgcggtgaattgtttacatgtctttttgcatcgtcgggttttgatctgaaacgggtgattcgctcggctaaagataatgaagatataaagaatatattgaaggaactatggtcgaatagacatgatcaatattcagccgagagagaacagaagaaagatcagaaaaaagttgaaatgtcatacatcggtgggtagtgacaacaaagtatcatgatcatgtatttttgaaaagaagagaaaaagtcataatcattgttgacaatctttttttgaaataggtctattcatcttatgaatccagtcattataaaaaaccagcagaaactctgctggtttttaaaatgttattttgtagctcaaaaaggtttagaaatgcctggaaaatagaattttaaacattttttgctactttacttttatgagagctgtgataagatcaactcaatctttaccagctcgatttttttactcctgggatgtggcccttataggcaagctcacgaaaagcaattctagacattttaaattttcgtaagtaacctctagggcggccggttaattcacagcggttttttaaacgggtaggggaagagtctctaggtaatttccgtaaagcttcatagtcacctttttcttttaactcttttcttaattctgcatatttcaatacaagctgctgccgctttttttctttagcaatcttagatttctttgccacttaaaaccctccttttttaatgttggattttccattgaaaggggtcttcaaatgtagtccaatcttgatcaaattcttcaggtgtgagtaagcattgatctagtgtgcgaatgatatctgctttaggcaaatctacgccgataaacacaagttttgtatgccgatcaccaaattctgcgtcccactcgtcaagaagctctggttcttgctttaatatccgtgccttatcttgctcaggcaaggcagcaatccagtatgcaattggttcaatcgcaacagattttccggcctgtgaaattaaaatggttaaatcatgatgtgtggcaagccatgtaaatcctttagcgcgaactatttgctctggcatctgatctaaccaattatttaacctgccagtatggaaggggagtcttctttcataaacaaaagatgagatttggtattcttctgtttccggcgtatgctgagaatgcccggcgttgatttctttgatccagccagcagaagcactggatttttcaaagtcaaataaaccagtattcaaaatgtcacttggctgtactttaccttttgaggttctgatgatagatgcttctggttgaagtgtggtcagcacgcgctcaagtcgatctaattctgagtttgatactagatcacatttatttataatcagcacgtcacaaaattcaatttgatcaataagtaaatcggaaatttctcgttcgtcatcatcggaaacggcttgtttacggtctaataaactttctcctgactggaagtcggtccagaaacgattcgcatctacaacagtgaccatcgtgtctaaccggcaaaagcgtgtcaaatctattcccatttcttcatcaatataagagaaagtttgcgcgactggaattggttcactaatacctgttgactcaatgacaatataatcgatatgaccagtcttacacaggcgttctacttcgattaacaaatcttctctcaatgtgcagcaaatacaaccattagacaattcaactagcttctcatctgatcgagagagctcaccgccttgtttgactagttctgcatcaatattaatttcgctcatgtcattgacaattacagctacttttaaccctttacgattttgtaggacatgatttaatattgttgtttttcctgcacctaaaaaaccgcttaatactgtaacaggtattcgcttattcatttctttctgtccttttaaccatactcattttgatttccgcctcacttaaaaagtaatgattacgatttaaaatctaaaaaattattttgtttctctatgaagggtatatttctttagccgaggagaatatttttttaactccagtcggtccgggttcgttcttttattctttgttgtgatatagtttctgtcacccgtttcagtacaggctaaggtaatttttacgcgcatcagtaataggatcctcctttaattcgtaatggttacgatttgtattttaaaatgatcaaggcggaatgtcaagcttagtaggatgaacaatgccaaatgatcaaacaaaaggggtatcgaatgttcattgatacccctctccattaataaaagtctccaagctcttgttcgtattcaccttcgtattgctggacgtcactaggaatttcttgaagaaaggctaggccacctaatatcagcatcaagataatggcgatgaatgagagaatgactgtgacaatacttgatatggcaaatagcgtctgcattttcatcatcttagcatattgttctaataactcttcataagaagtatcaggagcttgaattaattgttcagctgcgtttacagatttttgtacatggattcccatcataatgaggaagacgccaagggcagcaggaagaacaagccaaaaaccaataagaatagctaggccgcctgaaatatagagaaatatactaccaactttcccccactttgtgatcgaatgaagagattgaatgattttctcagtttgttgcaatggtgttcactcctttatgtattcactctttatcatacttgagcaagtagtactttaggaagagtgaatgtagagcaattaaaaaatatttctatcttcactttactatttatggataaataaattatcttcaaataagaaaaaagtaacatttactataaattttaacgacaatttatgtcataaataagattagtagttaaaaataattagtaaatttatcaaaatatgttgttagttgtcttgtaattggttattattgtgttgtattaccataaaaattggaaggtggaattcatatgttagatcgtttcttaaacaaaatgaccaatgttcaacctgcagcttcaagatgtattttacaaaaattagtcacttcatgtaaatcagcgccaacttgtttccttcaaggtgttggaactttccgttactacgtggatcgtgatacaggtgagatatgtactagccaagaacgcgttagatgtggctgctaaattcaaggattttatttaataggatgtgaacgcatgagcatatcttcaatttcatttttaacaaatgctgtgcagatgtcaaacagtcgtcaagcgggtcaaacatcaaattcttttttaaaccaagctgcgaaaattgttcaaggcgaccattctccagaagagagaaaggcattatttcaacaactgactctagttcagcaagggaaagatttggagcttcatgtgtctaaattaaaggaactagagaaagaggttcaaaaagaatcgtcttcttcgtctgttactgtgaatcagcatggtgaccaagtagacatttcaaatgaggctcgcagtgagtttgaacaagctgaggaacaagcggcagcttcaagtgaagcaggtgaaattgccgcaagggaaaaggatcaggatgttcaggcagatccacaccaataaaaaaacgaggcgtgtgtttgttgtcttcacatgcctcatttatctttattttgcaggaatccttgaataaagaccatccggaaaaggggctgcatatgagattgtttcatcttcttctaccatgatgtaatatggaaactcttcaatctggaaggcgcctatcatttgttcgtccactgagataacttgcatgatggtttggctatcacgatataattcttgatcctcttcttgcccattctttagcaaaatactaaaagaaatgtctaattgacgctgccttttcgtttctaggaattgttccagtgatgggatgcagtgcggacatgctgtgtcagtgaatataagcagctgttgcttgtgattggtttgcagcaaatcattcatttgaataggtgatggtttttcaattagcggatgaacaagtttttgtccgacatgctggatcggtaagatgattaattccatctggtgttttaaatagatgatgattccgatcgtcaataaaagactgcaaagaataagagtgagctgtaaaagtaagattgaattcatcgttatcgtcctctcagaatgaagttacgcagagctatcataatataaatatcaaaaatatgtcaattatactaaatggtgtaaggtggagcgtttgatgagtacagtgaaccattgtttatatgcaatctcctatacttggaaaagaagtcgatcatatcttctgttaactctattgatccaagtgatcgttggttttatgcctttggctagtgtctggattattcaaacattgattaatgaaattattttattcatgacttcttcaggagacattcaaaaggtcttaaggttatttgggttgcaaatggtcattgtggttttaggatatgggcttcaattcattcttcaacttagtcagcaaaaagcgacaaatttgattggtttgcatttgaagggtgaattgcttcaaaaggcaatcaggctgccatatattacatttgaacatccgtctttttataatgaaagtcaacgtgtgatgaacagtcatcagcatgttctgagtatggttagaagtatttttacaatcatgagcgcattgattactgttgtatcacttctcatttatatgatcggtatccattggggtttggcggccattctgatcttatttaccctgcctgtcttgtggattgagctcttctttggaggcgcacggtatcaactaaaccgcatgttaactgctaacgatcgaagagaaatgtatgtgtccgaccttgttgcacagcgagattcattgaaggaaatccgtttatatggaataggacattatcttcttcaaaaatggaaaggtcattatgtaaaaagtgcagatgaaaaatataaattactaaaacggcaggttcgctgggagatggcgggcggattgcttatgacatttgcctatgtgtgctgcggtctttttattgtctttcttatctttcaaaaaaaattagcagcgggtacgtttgtcgctgtgctccaagctgtgcaaaatattcaaagtggttttcaagacttaacgagggaatgttctagtttatatgaaacgagtctctatattaatgaaatgagaacttttcaaaagagagaagaagaaattgatgaacagacagagaaaggggcatcgcttcggaggattgagtgtattcagtccattacgctagaaaacctctcttttacctatccgaatatgaaaacgcctgctattgagcatatacattttcatatcaataaaggtgaacgcattgcattggtgggggataacggatcaggtaagacgaccttgattaaatgtttgaccggtttatatgatccagacaagccgaatatgcaaaaggtcaatggtgagtctatttcgaccatttataaaaaatcatatcatgcgagaatggctgtcctttttcaagattttatgaagtacgaattcactgtgaaagaaaacattggatttggccgtatcgacgaaatagatgaggaagagcgcatggtgtcagctgcgcggcaagcaggcatagagaaaagaattcatcaaatggaagaaacatacgatgcgcagcttggccggttttttgaagaaggtcatgaactgtctggcggacaatggcaaaagcttgcgatggcgagaaccttctttagagaaagtgattttatcattttagatgaaccgacttctgctcttgatccgctatcggagattttactcattcgaaagctattcgatcatacgcaggatcaaggggtcttgtttatcacacaccgtatgggagcggcccgcttagcagaccgcattatcgtgatgaaagatggtgctttcgttgaagaagggaaccatgaagagctgatggcgctaggtggagagtacaaaaggctttatgaggcacaatctcaactatttcaacaaaaggagatggcgtaaggtgagtgtcttttattttataggtgtctatttcttaggaatcatctttgcaggtgcatggcttgataaagtgagaaaacaaacggcgcatatgcaacagatgaatgcttatcggctgctgccttctgcgctcacggcgccaatgttttatttgtttttgactattgaattggcttgtactggtctattgttcgtatggaacatgtctcttgtacctgcgattggtcttacagcacttttatgtacctatactggagcggtcactttcaatttattgagaggacatcgtaacatttcatgcggctgtggaggtttacttgaaaatgaccgtcttcactggggaattgtgattcgtaatgtgtcgatgctggctcttgtgattggcttgttttatgtgcatccctatgtagaaacaattccatggcaatttcacattatttgttttctgattgcagtggctgtctgtttcattatagcggtgggaaaagacatcatgatgttcaaaagaaagtggaatcaatttgaatcatttatagaaggagaccaagtgaaatgacagatattctactgattattgtgttattcattgtcattgctcagctggctgtggtgtttttgcttgcccgctttatcggaaaatttatgaataaaatcaaaactcttgatgggattgaattaaaggaagcggatgttggtgatgcggcgccgttatttcgaagctatacacatttaggggataaggtcattttaaaggaatatttgcagagcggaagagccgtgatgctgttatttgtgaactctacttgtatgacatgcaaaagcattttgtctgatatgaagcagcacatctctagcgacgatactcaattcattttgatcaatggagatgaacaaggagatgatgcatcgcttcttcaattgctgcctgatcaagctgtgtatgtgcgctcttcgcaaatcatggagctgtatggggtaactgttgttccgcaagcgattctgatggatgaacatggcatcatcctgcaaagaaaatctcttcaaaatgcgaaacagtttgaacagctgttacatgcttcataaaaaagcgtctctttgttggagagacgctcgttttataattcttttcctagaatatctaaatcgtacctgctgccgtccatttctgcgatacgtggcaggtgaccccatgtctcaaagccgtgctttttaaataattgaatgctggcttcgttgtgcccgaaaataaaggcaagtaacgttcgaatgcctaatgaaggtgccaactcaatggcctcttgtaagaaaagtgaccctaagcctttccctcgatcgtcttggtttaagtaaatactcatttcaacggtcccgttgtatgcaggtcttccgtaaaacgtttcaaagctgagccagccgtagatatgtccatcctcatctgttttcacatagagaggtcttttctctgaatgattcaaaaaccattgccggcggtcttcaactgaaactggttctatgtcggcggttacttctcttgaagcaatggttgaattgtaaatatcaacgatcgctttgagatcatcttctgttgctatgcggttgaaagttttcacaataaagtcccccatctttttttcattcatcatacatattattggtgcgattgcgcaaaataaaaagaaaaatgatttcgtgtgtatatattttttgaaaagtgttcagaatgttgctgaggtgatgaaaaatgagagaggaagaaaagaaacgtacttccaaaatcacaaaagttcagcaatttttccgtaagcgctgggtattccctgctatttacttggtcagcgcagcggtcgtgttaacagccgttctttggtaccaagctgtatcaaaagatgtgaaagaccaactatctgatggaaatcaaacagggcaagaacagcgtgatgatgccgttgaagttggaaagccaattgaaaatgttgcaatgccggtccagaattctgataatgtttctgtcgtgaaaaagttctatgaagcagatgctgatcaaaaagaaaaagaagcagcacttgtaaactataataacacctataccttgagcaaaggtattgatcttgcagataaagatggcaaagtgtttgatgtcacagctgctcttagtggaacagtggttcaagcgaaaaaagatccagttctcggtcacgtcgttgaaattgaacatgaagatggattatcgactgtttatcaatcgttgtcacaagtgagtgtcaaagaaggcgatgaagtgaagcagaatgatgtcatcggtgcttctggtaaaaatctttatggtgctgaaagcggcaaccatgtgcattttgaaattcgtatggaaggtttagcgcttaatccacttagcttcattgacaagcctgtttcgactattgaaaaggccgcgcaagaagtgacggaagaagcaaaagaacctgctcagccaaaagctgatgaaaaaacgaaggaacctgctgctgaagataaggccaaagagcctgctggagaaaaatctgaagaaaagtctgatgagaaggggaaatcctctgatcaagaaaagtcttctgattcctctaaagacagcagtcaatctgaagaaacaaaacaatcttaaagccttgcaacctctgtgtatgaattatgcagaggttttttctgtcttaaaaaaatcctccgcacttggcggaggatggtttatagggcggcaggcccttcttcacctgtccgaatgttgattgtattttctatctcatatataaaaattttcccatcccctggttcgcctgtacgaagtaccttttgagctgtttctacgaccagttcgacaggtactttgcttaggacgatttcaatctttaatcgttcgtacacattgctttcctttttgacgccgcggtatagctctgtatgtcccttttgtaggccgcaaccgtgcacattcgaaaaggtaattgaggtgacaccaatctttccaagctccacctttaatgtttcaaaattggctggacgtgtgacaatctccactttatacattttgctcatcgagacacccctttttctttaatcttgataggctttttcaccgtgcatggttaaatcaaggcccactgattcttcttcttcggttgcacgaatcttgaagaagagattgaccactttgatgatcacgtatgtcacaacggctacaaaggcgtaggtggcaacaatagcgactacttgcttccaaagtaagctggcatctccgtaaaataagccattggctccgccgtcattgacagaggttgttgcgaaaagtccagttgcaatacctccccaagtcccgccaattccgtgaagcccgaatgcatccagtgcatcatcatagccaaatttggctttgagtgagaagactccccagaaacacacgatcccgccgatgattccgatgataatagaagcaaatggggtgacaaaacctgcggcaggtgtaatcgcgacaagacctgcgatggctccagaaatcgcgccgagcatggtcggctttttgttgatcatccactctactaacagccagccgatgattcctgcagcagcagctgtattagtgttaataaaggcatacatcgcgacactgtctaatgtaagggcacttccaacgttaaagccaaaccatccaaaccaaatgacagctccgccaagaagggtgtagatcaaattatgaggagaagagtttgctgcttctttacgcttcccgagcacaatcgccacgactagacccgcaacaccagatgaaatgtgaaccacgtttcctccagcgaagtcaagtgcacccatttcgccaatccaaccgccgccccatacccagtgtgcgactggcgcgtatacaaatgtgacccaaaggagtgtaaacacgacgaccgctgagtagcgaattcgttcagcaaaggcacctgagatgatggctgttgttaagacggcaaaggtcatttggaacatcatgaacaatgaatgtggaatggtctcactgtaggaaccaggttcaaagccaacgccttttagtccaatccagtctaagcctccgatccatgcattgcctggcgcaaaagccaaggaatagccaaacatgatccatacgatggagacgattgctagtgaagttaagctgtgcatggttgtgcttaagacgtttttacttctcacgagtcctccgtagaataaggctaaacccggtgtcattaaccacacgagtagtgcgcagaagaacataaatactgtatcacccatttgcatgctgcattccccctgaatcattcagaattaattgatttcttaattcttcattatagagagaaaagtcatatataacataaccgtgtaagttaatcttacatagtttttggttatattcaatataaatggatgaaaagttcgtaaaaaaagagaaaaaacgtgcattgagcacgaaaaataaagggcgtttgacctataaaatggagctgagaaacagcttggttcgttcctcttgaggagaatcgaacaattctgatgggatgccttcttcgacgatgcggccttcgtgcatatagacgacacgatcggcgacttctttcgcaaagcccatttcatgtgtgacaatgaccatcgtcatgccttcttttgcgagacttttcattgtttgcagtacctcgcctacaagctctggatcgagggccgacgtaggttcgtcaaataacatgacatctggcttcatggcgagagctcttgcaatggccacacgctgcttttgaccacctgataatttagaaggatatacgttggccttatccgcaagtccgaccttttccaacaggacgttggcttctgatacagcttgagccttttttgtttttctcaccatgacaggcgcttcgatgatgttttcaagcacagttttatgcgggaagagattaaaatgctgaaacaccatgcctattttttgccgcatctcgtttaattgatcgcgttttgggtgaacagggctgccatcaatgatgatttctccatcatttttgatttctaaaaagttcatacagcggagcaaggtgctttttccagagccactggctccaattaagacgaccacatcattttcataaacagtgagatcgatatcctttaaaacatgcagttctccgaagtgtttattgagtttttcaacacgaatgagttcctttgattctgtcatgtttctcctcctaatggtcactgactgataatttcttctcaaaggtttggacagcaaatgttaatagcaagacaagaactaagtaatagacggctacaacaagtaaataggtcatattgtcaaagctgtttgagccttgggtcgtggcgacgttaaatagttcattgacgctgataaaggcggcgagtgatgaatcttttaagccgataatgaactggttgccaagaggggggagggcgcgccgcatcgcttgcgggagaatgatgcgtctcattgttagaaaacgtcccatgccaagagagcgtccagcctctttttgcccatgatcgattgattggatggcacctctgaatatttctgctatatatgctccattatgaaaggcgagcgcaatggaagcagcccagaagtcggggatatttaattcggtcagtccaaaatataggatgaaaatttgaacaatcagtggtgttccgcgtacaaggaagatataggcgttggcgatataaccgaagacagccacacgtgatattttcaataaagcaaagaagagtccgatgaacatgccgatgaagatgctgatcacagtgagctgtaaggtgagcagcattccttctaaaaaaatacctctagaatcaatcagcgtctgaaaaaaatgtgatagagtaggcaaaacaatcatctccatttgaagaaagtgcgcctaagaaaggcgcacaatcgtggttttaattttgtttgaccgtgatgtcttcgtcaaagtatttctcgctaatttgtcttaatgttccgtctttttttagtgcgtcaatcgcatcgttgatctcttctatgagctgtttattttctattgatacagcgattgcctgctcgctttgtccgagtctttcctgagcttcgatttttaattttttcttcatggcttccgcacctgtggcgaaatccgtcacgactgcatcgtgttttccgttggccagtgcttctaaagcgactacatcactgtcgtaatattttggttcctgcccgctatgttcctttgcaatatcagcgtaggacgagccttttgatacagcgatttctttgtcttttaagtcatcagcatgttgaatgtctgctccaggtcttgtgaaaatttgcggaccagagtagtaatagggcttagataaaaggacgtgtttttttcgttcctcattgatggtatgacttgcaactgctgcatcaaattttcctgctttcacaccttcgacgatgcctgcgaatttatattttttctgtataggctcgaggcctagtttgtcactaatcgcattgcctacatcgatatcaaagcctgacatctgatttccatccatgtaactaaacgggtgaaattcacctgatgctgcaaatataaattttccatcctccaaaattggcgaccctttcgctgtagaattacgtttatctccgttcccatttgtttcatttgaaccacacgaagacagaagtaatactgcaaccgagaaaagggctgggacccaaaaccgtctttttttaataataagcttctcctccttttcagccgttctccatataaggagaaagtaggcttttaaatatgtgtagcatcttaccatttgttcctcatattctcaattttatatgtgtttttccaacactcgccctttttaaaatgtatgtcttgcttttccgagagagaacttgaattgattagggtaaaaaagggaaatgaatctcataataacggaaggattggcaaaaaacatgccagatcacaaaaagggggtcggtgtatgaacaagtggagagacagccgaaaggtttttttaactgctattgcctttggaacgatgttaaatccactgaattcctcgatgatttctttggccttgcatcaaattcagcatgaattcggtttgtcatttacgactgtatcttggcttatttcgtctttttatttagcaagtgcggtgacgcagccggtgagcggccggattggggatcatgtgatgagccggagaacattatttttattcgggctaggtcttgtggcggtgtcagccatctgtgcgccgtttgccccaacgtttgcagtgctgattgtgatccggctgctgcaggcgattgggagcagtgccatttatccttctggtgtcggactcattcgggatcatattcaggaaaagcaggcttcggcgttagcggtattgtccatttttgcttcggcgatgacggcacttggaccgacgcttggcggctttttgatgacaatcggcggctggtcggctatctttttagtgaacctgccttttattttgatcagcttctttcttggactaactttgtttccaaaggagcagaaaaagagaaagcttcgtataggtgaaacggtacggaagctcgatttgccagggatgcttctttttacagtttgtattgtccttctgctttcgtttttattatcactaggtgatgggattcaatatgtacaggggattctttgtctcgtgagtgcaggcgcttttatctggtgggagtatcaggtggatgaaccgtttattcaaattcgaatgttcagacaggagcagcggctgtcacttgtgtatgtgcaatttatcattttaaatatatttttctattgtcttttctttggtttgccgagctatttccaggatgaattaggctggcgtgtggaaatgacgggtctttttatgctgtgcatgtctggggtgagcatcattgtgtcgccgctaacaggaaagtgggtggatcgcggggatgaacgtcatccagtattagccagtgcggtattgatgctggctggagcgtctgcgatgaccttcttttttattccggcaccattatggggaaaaggggtggttctagcgctgcttggactgagttacgggattgggaatgttgcgctgcaagctgcgatgctcaaggcaagtcctcagcatatgattggcacgtcctctgggctttttcaaacatgccgttaccttggttccattctgtcgtctgctgtcctcggtatgctgtttggggatgaaattgctggtcctcattttgagcagttaggctggacgttgatcatgatttcccttaccggcatcggtgtcagtctttatttttcgaacaaggtcagaggaggacagccaataaaaaaagcggcgcgataagtggaagaagattcttcatcacattatcgcaagccgcttaagagttagacaggtcagagccctgatccttttgcttccttctgaatattttccctacaattgtctcatagaaagtgacaatgcggtcaattggagagtcaaagaacttccataatttattcatgataaagacaaccacgatcgatacgactaagctgcctaagacatctaatggataatggtgaccgacccagatgcgggagaatcctgtgagtaatccaaagacgagcaagatgttgccaagctttttattacgagatcgaatggcaagtgaaagagccagtgcacctgttgtatggtcacttgggaaggaagcgtctgctgagtgcggaatgagtgtgtcgactttatgcgccacaaacggccgctcctcataatgaaacagcgtaatcgcaaaattgacgataagtgccgcgatacccgttacacccgaaaagaagacatgcttcttaaatttgtgattacctaaaaaccagcaaatcaataagacaagggcatacacaagaatggcctttttcgtaatgaaaatcatggcctgatctaaaaactcagaatgatgagccatcccgtgtatgactttaaacaattcgtaattcaaaacatcacctataccttcgcttaatgccaactatttttcaaataatcgtctatttgaaatatcctatattttagcatgtttccgatgaagtttaaaatagtatcttattctgatagggagaccttctgtgcttttgcttcttggggctttcgttcgctccaataaaaaacaatcatactgagcaagacaacaatacctgcaatgagatatacatttgaaaagtcggtgaagctgacaagaagaccaaatacaaatgagccagcagcaatccccgtatcatataaagtgaagaaagtagccgtcgcatagcctgtacggtgagctggtgagtgctgaatggcaagtgtttgtaaacatggtactagcgatccatagccaagtccaatgacaccacctgataaaagaagcattgtagctgaatgtgtagctgtcagcatccataaaccaatcgcaaaaagagcgatcgaaggatagatcacaatgtgaggtcctactcggtcaaaaagtctgcctgtaaaaggacgtgatccaagcattgctgccgcaaacacaataaagaaataactgcttgcccccatcaagtgaagggaattggcatagactgaaataaatgaaatgatcggcgaataacagaaggaaataatgatgccgactgccgctgtttttaatgcacctttttcaaacagatgagaaaaagtaaatcgaaagacgacactacccccatcttcaagctctggctgtctgatcagcatcgtaaaagcggcaccgatggtaacgataatggaaaagagaaggaataaggaatggaatcctacttttcctacttgattcaatgcaataaatggaccgataaccacagcaaggttcatggacatgacaaagtagccgagtccttccccgcgtttatgtttcgggatcatatctgccgcaatggcactggctactgtcgtcaaaatgctaaaaaagatgccctgtacgaaacgcagcatgagaagcgtatggaattgatcaatcggaatgtataaataagtgagtaaggcaaatgccgttgacgagaaaatcgccatccgttttttgccgaatttctcaataatggctccagaaaacggtcttgtcacaatagcagacaataagaaacccgtcacaagaaggccaccctgtgattctgttccatttagttcatccattgtgtaaataggcagcaaggtcaaaagggcataaaaagaggtgaacgtaaataaattcaccaggacaatcatgataaagtctcttgtccaaatgcgttcgttcatgatgtatgtcacttcctattcagttgataatttgtgtaaaagtgtatggaggagttgtttttcttcgtgggtgaaatctgaaagacattcttcttcaaattgttccatcgtacgtttgatttcttcaaatcgggccttagcatcatctgtcatcacgatcagattttcacgtttgtcttttccttgtacacgtttcacccagccattagcttctagacgggttacggttcgggtaatggttggggcttcgacgttcaaatatgtccaaatgtctttttgggttttcgggccgaatgtatccaaacaaaaaagtacagtccattgggacatgtacaagtcataagcaacaagcgcttcgttcgcctttttagacagcaacctggcgctttggtgtatttgatgtaaacactctctatttaacgtatccatatgctcacctttttttaaatatttagctaggtaaataaaatcacctttcctattttacgtgctcgacccattcttgtaaagtgaaaattttcgccactcgaaatgattgcattttctgataaatcccttgtcccatcttcatttttagcatattccctatgcaatgctaatacactgttacaaacctgacaaagagagtgtttgaggtgagggatcgtgtttggcatttactacctaatggatgagaaattaagacgaacaagcgcccctgaaaatggataatattgatacggatctcatttcacacttctcacatccattttagggaggtcgagtggtgtgcacgattacatcaaagagcgaacaatcaagataggaaagtatatcgtggagacaaagaaaaccgttcgtgtaattgcgaaagaatttggagtctctaaaagtactgtacacaaggatctaacagaaagactgccagaaattaatccagatctggctaatgaagtgaaggagatactggattatcataaatcaatccgccacttgcgaggaggagaagccactaaattaaagtataaaaaagaagaaattttagaaggcgagcctgtgaaacagtaagcttagttctttgttcataaacatgacatatatatcttcctcatatcggtagtttctaaccacaaattttgtaaagacttttgtaaagaaatatctttttttctgcaaattatgatagaatatataattagggcagaatgtggtatttgctatggaaacagattttcaaggaggatatatatagatgtttgctagggatattggaattgatcttggtactgccaatgtactgattcatgtcaaaggaaaaggaattgtgttaaatgaaccatctgttgtagctcttgacaaaaacagcgggaaagttttggctgttggagaagaggctagacgtatggttggacgtacgcctgggaatattgttgcgattcgtccattaaaagatggcgtaatcgctgattttgaagtaactgaagcgatgctcaagcattttattaattcattaaatgtgaaagggctgttctctaagccgcgtatgctcatctgctgcccgacaaacattacatctgttgagcagaaggcgatcaaagaagctgctgaaaaaagcggcggtaagcatgtatttcttgaagaagagccaaaagtagcagctattggtgctggtatggatatttttcagccaagtggaaacatggtcgtagatattggaggcggaacgacagatatcgctgtcatctcaatgggtgacattgtaaccgcctcttctattaaaatggctggagacaaatttgatctggaaattctcaactacattaaaaaagagtacaagctgttgatcggtgaacgcacggctgaggatattaagatccaagttgcaacggtattcccagacgcacgtcacgaagagatttcaattcgtggacgagacatggtgacaggattaccaagaacgattaccgtcacaagcaaagaagtagaagaagcattgcgtgaatctgtatctgcgattgttcaggctgcgaagcaagttcttgagagaacaccgcctgaattatcagctgatattattgatcgcggcgtcatcattacaggtggcggagctcttctaaacgggcttgatcaattgcttgcagaagagctgaaagtaccagttttcgttgccgagaatccgatggattgtgtagctgttggtactggcgtcatgcttgataatatggacaagctgccaaagcgtaaactcagctaatgatgtccctcattctttttcgaaagaatgggggatttttattaaagaaccctgcaaatatgccgatatatttcatagaagattgtgtttaggtcatgtgaaagaattttaatgaggtgagcacgtgttaaaaggactatacaccgcaacatctgccatgatcgctcaagagcggcggacagaaatgctttcaaataatatcgcaaatgcgaatacgccaggatataaagcggatgaggggaccatgcgggcatttccagaaatgctgctaagccgaatggagtcaggacgttttcaaacttcctcaggaaaaggttttagtgttccgcagcaaacgccgattggcggcattaatacgggaacatatatgcaggaactaatccctcaatttacacaaggaactttaaaaacaacagatcaaacaacggatgtagcactagtcgaaaataatgtgccgatcaatccggagaccaatcagaaatcagcgctcttttatgcggtcaataccccagaaggcgttcgttatacgaaaagcagctcaattacaatgaacgcacaaaatcagttgactatcaatgggcgtgcccttctttctgtgacaggtcagccaatcacggttcagagtgagaatttcaaagtgaacgcagatggaactgtgagtgaaaatggacaaaatctcgggcaaattgatgtacgtgttgcgatggatacaaggaacttagcgagagaaggaaatgatttataccgtacagctgataaccagcccctgccaagcgcagtcaataacggtcaaatgtcctatacgttaagtcaaggtgtatcggagctgtcgaacgtggatgtgacaaaatcatatacagaaatgacaaccgcctatcgagcatttgaaacaaaccaaaaagtggttcaggcgtatgataaaagcttagaaaaagcagtaaatgaaattggcagagtgtactaatcaagaaatgacaaagaaaggaggattctcatgcttagaacgatgatcaatgcagctgtatcaatgaacgaagtgcaaaagcagcttgatattatcagtaataacatcgcgaacagtgaaacaacagggtaccgtgcgaaaaatacccgtttctcagagctgatcagacaacagttcaaccaggtggatgaaaaaaatgcgcaggtggcaaacagtcgtctgacacctgatggactaaggcttggtacgggtacgatggtcaatgcgtccattaactcgctgcaaggctcgattaaagaaacaggccgtgatcttgatgttgcatttggagcgccatctcagtatatgcaggtcaatgtcggcggtaatattcgttatacaagagatggttctctttacttacagccaggcaataatcgtaatcaagtgcagcttgtcactagcgaaggccatccgattcttgatgaaaacggaaatgaaatcgtcttaaatgcgaatttccgtgatatttcaattgataaaaatggacgtctgacagccatttcaagagataatcaaccgaatcagcaagtgaatctaggtgttgtacaagtcaataactcttcagcacttgtctctgaaggagataatttgttctcagttgacggtacttatcaaggtgcattaacggcactaaatggagcaaaccgccaagcgattcaacttcagcaaggtgcacttgaaacgtcgaatgtggacatgtctaaagaattaacagatctcatgacaacacagcgctcctatcagatgaactcaagaacgattacgatgggtgatcagatgcttggattagtgaatacaattcgataatgagcaggttgacatcagcctctcatgataaaaaaggcggctcgctcaaagtcgcccttttttttataaaaatctgagacatcggcaagcagatcctcaagatcaatccaagcttcttttcgttcaagacatgtgacgagccttgcgatctgctcatctgcctttggcgtttggctgtagagaagaaataagatttggaacttgattcttaaaatatcaaactgagaaacaacggcttcttttaatcctttttgaatatacttcattccttcatcggttaaattttctttataacaagaacgcaccgtttcgtagaggcacgatatataggagtgtgcggacttccggtatgctgggagacgaagtgcttttttaaagtattccagcgctttcttgtgacgattttgtctcgactgaataaagccagcgtcataataaacgataccgagcaattcttgatcatcaatgattttcacgtattcgatgatctcaataaaaatagcttctgcttcctcatattttttttgatcgctataattaaggccgagcacaattttacaacgatagaggctatgatcatccccatgctttgcaaagatatccatggctttttgaacatgacgaattgataacaacgaatagcggttgttataataaacaccacttgttcggaaatggaactctgcttcctccagctcatcgttaaggaatgacaggcgttcttccgccttttcgagatagtagatcgcatcattttgatcgctgtttaaagcttcgtagagccctagaaagaagtaaaagtaataggccagttcttcgttcatatcatctttgtgctgcatcagttcatgtttgattttttctaggtcctctgtctgattcatccagagctgatggcgaaaaagcatcagctgataatgtaaatagagttcctgtttttttgatattttacgtttatgctttaatagagttgttttgatttcttcagccttcgaaaaatgtcgatgcttcagcattgtataccacgaatggagaagttttttaatggatttatcactcataaaattcatttttaccctcttattcaatcaatgatgtaatatatattaccatatttgtgaaaaaacaatgagtgtagtgtggattatatttgatgacaataggtaatgatatattctattttttaccatatatgcagagcggacgttgaaaaatacgagcattcataatatacttctataggaatcaaatgaagatcatcgatatagaaaaaaggagagatcaagatatgcttgatgctcagcaaattcaagacattattccacaccgttatccattcttattggtcgaccgtattttagaggttgagggagagaaaagagcggttgggattaaaaatgtcacagtgaacgaagaattttttaatggtcatttcccaggatacccagtcatgccgggtgtgcttattgtagaagcacttgcacaggtgtttggggtgattatgttaggtaaagaagaaaacaaagggaaaattggtttgtttgcaggaattgacggctgccgtttcaaaagacaggtgaagcctggcgatcagcttcgtttagaggtagaagtgacgcgtctccgaggtccggttgcaaaaggaaaagcagtagctacagtagatggcgaagttgcatgtgaagcagaactaacattttctatcggtcctaaagtatcatgatttgcctggcggttcatcaaggatgaatcgctttttatatggaaacgaccagcctgaacggatcaggacttgcatttttgacaaaaaaacgtcatattagacaaaaaaagatgaaggtgataaaagatgctgaaagaatttagagaatttgcagtcaagggaaatgtcattgacttggctgtaggtgtcatcattgggggagcatttggcaaaattgtcacttctcttgtgaatgatttgatcatgccgctcgtcggtattattattgggggtcatgattttagcagtctatctattaagatcggatctgctcaaattttatatgggagcttcattcaaacagtgattgatttcttgattatctcgttttccatttttatctttattcgttatttgaataaattaaaacggaaaaaggtagaggaagaagaggttgtagaaacgccggatcaaacggaagttttactaactgaaattagagatctattgaaaaatcaaagccaatcgaaagatgtgcaatagaaaaagagcggctaatcccgctctcagcgtgtaggcaaaccttcgcattcgcccgcaggtctgtgctccggtgctcgccctttctagacttcaaaggttttctatcacgctgaaaggaagacaaagggctaaaataagattcattttagccctttgtcagcaatctaagagcggctaatcccgctcttttttatgtgttttgtttaaatgcatccagcagtttttctccggaaagcccctctttgacgaggtcttttagtacttcttcggtttctgttctgtaacggtttgtaatcattttaccatcgagcagcacagaaatgttttcttctaaagcaacaatgtttttgacttggacagatagatgaacagggcggttgttttcttttgtgattgtcacaagaatcttcacttcagtgtgctgttgaaaaagcacctcaaacacctgtctatgtttctttggaatgagtgcctcgatcatccagtgattttcaccatcttctttattaatgattaaaccgtcacgaaggggaatgctggacattttatcttgctttggatcaagttcgatttttaaatcaatcagcctaaaggttttcatatttatcacctcacaagcgttcattattcgtaagtattattatagcatacaacatctttataaatgaaaccgctgcctgcttagaacgagctgcatatgagtgaaaggagatgttttatggagtcctatcaattgcgaaacatacatattggcgaggagaaggcaaagagcacaattcgcgtttattcgtggggagacattctttcattttgtgatgtgtacatggaagaaggcgagtcactcacgtttcaatacgtcaccgaggatcaaatggactgctttgaatttcaattgtcgattcatgacggacagctttgtttttattggtttgcgtgggacggttctgattatattcacatgccttctagtaattggattcattcagacgttttttatcaatttatgaaaaataagtttttcatcaaacaaaacaagatgatgttttatactcaagcggtaaaaaacagaaattaaagaggaaatagagaatttgagagatcattttgtcattttcatgttttgtcacatacgacctttctcagtagactaagggtagttgaaaggaaaggaggtacggtctgaaacaaaaggtaacgtctagcatctgacagcccccctctagctaaagctgatagacgctgccttgtgcataagaacactgcgtaatagaaccatagcttctttgtataggtcatgtgtcccctgtaaatccccttgtgtgtatccggtcatgtagcgtggccgggtacccttttattcactgataaaccgatcacctcttgcaaatagtggatactcatttcataatgatgatggattttatcagcagtatgatagccgaaaatggagacaaaaaggagagaacgatgacaaacattcaaatgatcgcaacggatttagacggaactttattgaacagtgaacacaaagtgagtcgggaaaatgagcaggcattaaaggaagcagcggcgaatggaatggaagttgtcgtttcaacaggaagagcgtattttgatgtgaggtctatttttgatcagcttggtatgaatacatgggtgattagtgccaatggagctgtgattcatgatccggctggacaagtgtaccattctgctgttttacacgaagaaaaggccaaacatatattgtcatggcttgaagaacgtgactattattatgaagtttttacaaacgaagccattttcacaccgaatcgcggcagagagcttcttgcgattgaaatggaccgcttaaaaagtgctaatccaaaaacggatcgaaatattttaaaacaagcggcagaagttcaatacagtcagtcaggtttttcttatattgatacatataaagaattgttccgtgaggatcgaaagctttcattctacaatatcttaggtttctctttctttgaagacagattgaaggcaggatgggatatgtttggtgatgattcagatgtcacaatggttagttcagccgatcataactttgaaattggttcaaaggaagcatctaaagggcaggcattaacaaggctggcagaacgacttggtattcctttaagccagacagcggctgtaggagacagtttaaatgacgaatcgatgcttctagcagctggtgttggggttgcgatgggcaatgcgagacaggatatgaaggaaatcgctgatcatgtcacgttaacaaatgatgaacatggtgtggcgcatatgattcgacaccttttgaaatagatgaatcggatgtcgttgtataaatcacataggataaagcgcattctacaaaagaggaattcagaactacttctatttacacctgatgtggaacatcatataatttaattatgaacataacccgcttgtaagaaattaaggagagtaaacgaatggcgctggaatcttataagtccgaaaatctgcatttaatcaaggaagccttagattatactcaggttggcctgacggtgacggacccgtctttacctgataatcctttaatatatgtgaacaagggctttttagatatgacaggctatcaagaacccgaggtattggggaagaattgtcgtttccttcaaggaaatgaaaccgagcaaatcgctctcaatcaaattagaacagctattgagaacaaagaagctgtcactgttcagctgaaaaattataaaaaatctggacagatgttttggaatgagctaagtgtggctcctctttggattgacgaaaatgaaggaaaacgtctttatttcgttggtctgcaaaaagatgtcacgaaagagaaggaacagcaggagcttcttgagcaatcgattgatgaagtgctgaatatttctgttccaattgttcctgtgaaagatggtatttctgtgttaccgatcattggtacgttaacagcgccaagatttcataaaattatctcaacagtctccacctatatctctcaatccaaggacgattattttattgtcgatctgtctggtttattagaagtggattcatttgtggcagatgcaatttttaagctgaacgatttaattttaatgactggtactgaactcattgtgacaggaattaaaccgaatcttgcgatgaaaatgggagaaatgagagaggacttccgtgaattgaatacgtatatgaacgtgaaatctgcattgaaaaagctgcacatttaacctaagttcatatgaaatgaaaaaagaggacttttcatcatgtttgagaaaagtcctctttttgctgggattaagatgattgagcggccgcacttaatgtgaataaatcttctagttcgttcgtcgatagctcagtaatccaactttcactttggataatttgatcatttaacgtttgttttgtttcgagcatttgatcgattttttcctcaatcgtgcccgttgtgatcatcttatggacgtgaacaaatcgtttttgtccgatccgataagcacggtctgtcgcttggttttccacagcaggattccaccatctgtcgtagtgaatgacatggtttgcggcagttaggttaagtcctgttcctcctgcttttaaagagagaattaagatgttgaattctttcttctggaagcgatccaccattttatcccgctcctgttttgacagactgccatttaaaaattgaactggttctccaaacatcttttccgccagctgcttgatcatgttccccattccaatatactgcgtaaagatgaggcagctttctccttgctcatgtattgcttttaacagctctgcgagtttatccatttttaatgaacgtttcagcagtttcacatctgttccactctcttttaaatagagagccgggtgatcgcaaatctgtttgagtctgccgagcatacttaaaataatggctttccgctgcattcctgttaacgaagccatgtgttcgaatgtatccttcacgagctgttcatataaagaagcctgctcagcggatagcggaatgaattctttttcttcgagtttctcaggcaggttcagggcgacctcttcatcttgctttgttcttcttaataggaagggctttatcagctgctgcagctgttcaattcttttttcatcacggtctttttcaatcggcaggacgaacttcttatgaaagctcgtcaggctgccgagatatcctttgttgacgaagtcgaaaatggaccaaagctctgtcaaacggttttccataggtgtcccgctaagggcaatgtgatgctgccctttgagctgtctgatcgctctcgattgtttcgtatgggcgtttttgatgttttgggcttcgtctaaacaaatcgtatcccactttgctgacgttaattcatcacgatcagaatgtgagagtccataagacgtcaggacaatatctgttgactcgtatgcctttgtaaagtgttccccttgagggcgcgatggcccgtaatgcagagcgacattcaaatgtggtgcgaaggtttcaagctctcgctgccagtttcctaaaacagaggtcggcgcaatgatgagagatggagcggcattttgcttctgctctttcagatatgtgaaatacgcaatcatttgaatcgtttttccaaggcccatatcatctgctaaacaagccccgaatccatgagatcttaaaaataacagccagttgacaccatgctgctgatacggccttagtgtgcctttgaaggactcactcatttcgtaggaaggcagctcatgcgtatcatttaactgatggacaagtcctcttaattgagacgaaagttcaaattgaatatgtgcaaatgctgagctgtctagcagttctggtatcgattcagaggatgcttcttgatctgccagctcgcgtgacaaaatatcagacatgtgcagcccttcattttcggcgcgctccatccattttttcatttgctggatgaaggttggatcgattttgatccattgccctcgaatgttgacaaggcgccgtttactttggacaagctcgttgaactcatcttctgtcagctcgatgccgtttgtagcaaagcgccaattaaagtccatcaaggcatccattccgacatgcgactcgcctcgcggggtagaggaaatccttgcttttagcatcatggtgctttctttgacgatttgccaccacgatgggagcaggatctcaatgcccatattcacaagtgtttcacttgcttcagacaggaagagccatgcttcgtcttctgacatgagcgtggtgccagatgtgaaagagagccaaggtacaatttgactgaatcgctccagctctcttgagattttatcttgatacggatgccaagaccttttcaatgaacggataccctcaaaaaagtgaaggtcgctgtttttcttatcacgcaaaaacaattcgattttccaatcatctccgtcgaaatccggttcatttaagcgcaagccgacagtgaaaggcgtctcgtcatcaatccagccaatcgtctccaagaaatcctgctcatccaaaaagtgtccttggaaggatgagagcgcaggcgattgtgctgtcatgcggttccatttgtgctgcaaggcatcatcatattgaatgtaatcctgtacggcaaaggagaaccaatcagccgtatagccatctaatagtccttctttgtctttaaaccgaagcacaccttctgtccacgcctcgtaatcgggaacgaaatcttcgtcctcgatgaattcgtaaatggtggaggctgtcttcatcagtggttccgtttcatccgttaatgtcacatgactaaaggtattaaatgaattttttcctagtaattcaacggtcatccaagggcttaacaggaaggcaggtgtgccaataaagctcacatcttctaaaaatgttccgtaaaaagacgattcgtgccattggaaaagctgcctcttcatttcattaagtggaacagggtgtccgtcctctgcttgcgctgaaatggtgaaagagaaatcttctgtttgttctgcatgaatgacaatttgtttatggcgtgtcatcaattaattttcctttcttcatttcctcttggaacgcacgcagccgtttcgttgaatcctgcagctgcttgacatatctttcccaaatcgcggtttttttcgttttatgataaagcgtgcgtagtttttttagcattttcacagattctcgataagcacttcgattcttttgatcgagaagcagtgagatttcacggtggtacgatggaatgagcgcttcaggctcctcttttgcaatttgtttgatcagatccttctccagttcactgatggagaaaccaacaaggctgtgaatctcaatccattctgcataacgctgctgtgcatataatagctgactatattcagtaaacgcatagggcatgcagatttggaggtagcgttcatataaatgatgatccttcgtctgcttaaagtatgcgtctaaataaaagaagaaatcactgacggctcctcgcagttctctataggaaaggtcgagctggcaatattcctctaaaatataggtgatctcatgataccagagcttgagccgcttccagtccttgcggtttgtgagatccttcagccaattgagcacatttggcagcatatctgcattgagcagctgtaattgctgaaagaggctttcgtcttctttctgtaaataatccatgtgcatcagcccgatggtacgttcaaccgtttgttcttgctgctgagcgttcttcagtaattctgtttcttttttaacccatttccctctatttaatatggtgccccaaatctccataaagaccgctactcgttcatgctggaaaggtccgtttatttgaagaagtgcccgaacggcagttggtgtgttttcaagaaacggatcgagggaaaaggaaagggcgtatgtcttcaagtgatccactgaatcgaaaatggtgttcatgagctgttctacatatggattcatggaataaaaatccttctcggcatcaagccgttcgaggtcgatcaattgatgaatccttaaccacacatcgattgaggtatgaatcgcatacaaactcttgaattcaggtgaatgaggtgcgtgtttttttaggattgataaatagccgtaatacaaatgctgcggtgtttgctggtgctttggtgtccgtttcagccagaggttaaattcctcttggaaaaaattcagccagctttggagtgattgttcgtctgggcgcttcacttggaagtgctggcgaatcaattctttgctacgttgtaattcatccttttctgaccaattttctgtaaatccggtcacactctctacttgagcgtatagcgaaaagaagacagcgagaatgtgtttacaaagtccatctgccggacatgagcagctgcttctcacaggaaacagcacatgaaggtggactcttgctgccacgacatcatgtacataagctgaccattccgtatcagattcttgcttgagacgatatacactgtcctgtctataagtaatcaatgcttttttgatgagttgtttgttttcatctgttgcaggaagaagttctttgagctgttcggctgtttgtttgatttcttcttcgttgatgttgtgctgaagcatttgatccgctcctaaccaagtaaaagattccaattcttttattatagctcaatggtgatttataaaaaagtttttcatgaaaatggtcataaatttcaaaagctgtcgaatgatgtattagagtattgcataaaccaaccatacagcatataataatgaaattagtggaatcgaaaggatacagacatggacaataagggtttaaatcaagaagagtttttaaaaattttgatgtacgctcatgatattggtgagaattcaaatgatgtcaccacaaaagaaatgcttgaaaatctgattgctcatattcgaaatggtcttgtttcataaaagtgaccccctgctagtgatggcagggggtttttgtatgcttttatgaatggaacgaaagctcccggcatacgatgtcattacaagcataaggcgtatggggagctgatggtgtcatgaatattgcaattgcaggctgtggatatgtggggttggtcacaggtgtgtgtttagcggaggcagggcacaatgtggcgtgtattgatattgaccggaaaaaggtcatgcagctgaaacaaggacatccaccaatgtatgagctaggattaaaagaattgctgaaacgcaatcttgagcaaggacgaattcaattttacataaatggagcggcagcctacccgcgggctgatgtgttaatgattgcggtcggcaccccgcagcaggcagacggccaagctgatttacagtatgtgtttcgggctgcaaaggagatgggcacaaaagcgaaatcaggtgcggttcttgtggtgaaaagtacggtgcctgtcggaacgggtgatcaaatcgatcagatgatacatcaagaattaggacggaatgagccgttatctattgcatctaacccagaatttttacgggaaggctctgccatttcagatactttgagggcagatcggcttgtcattggggctgaaacaaaagccgtattagaccagctagaggagatgtatgctgatttccacctgccagtggtcaaaacagaccgaaaaagtgccgaaatgatcaagtatgcatcaaatgcttttcttgcgactaaaatcagctttatgaatgagattgcttccatttgtgaaaaaacaggtgctgatgttgaatgggttgcgcggggaatggggctcgatcagcggatcggttcttcgtttctcaaggcggggattggctacggaggttcttgttttccaaaggatacaaatgcacttgtccaaatcgcagggcatgtgtcccacgattttgagctgctaaaggctgtcattaaagtaaacaatgagcagcgagctggttttatccgaagcattcaggagagactgggggcaaatcttgaagggaagcgaattgcgcttcttggcctgtcctttaaaccgaatacagacgatatgagggaggcgccgtcggttccgatcgctcatgaactccatcaattaggcgcggagcttgtggcttatgatcctgttgctacacgtcatgccgctcgtgaactgccggatcaagtcttgtttgctcaaacgattgaagaagcgataaaggatgtccatgcagtttgtatattaacagagtggacggagattcagacgtttccgctcacgtcctacaaggaatggatgagacagccgcttatttttgatgggcgaaactgtcacacgcttgaagcggcagaacaagcaggggtcgagtatcattcgattgggcgcagaccggtttctccaatttatatgtaaaagaaaaccgataacaggccatgttatcggtttttttaatgcggcagaatgaatccgccatataaaaaggcagccacaatgagaaaggcggggtgcattttgaatttggtcataaagaaaaaggagatcgcggcaatggcgaatgattgcgtccagccgatggctttcactgcatctccgccgatttcccatgttaataaaagcatcatcatcgcaatgacgggctgtacggataaggtcatgccttttacgacaggggattggcgaaagcggtcaatcagcttgagcaataaaatcaatccaatggctgatggcagtacagttgcaagcagtgccacgataaagcccggccagcccatgacgtcatagcctacatatgccgcgatcttcgtagcaattggtcctggcagtgcattggctaatgcaagcatattggagaacccttcgttcgtcatccaatgaaaatgattgacgatttcttcataattgagcgggatggatgcaggtcctccgccatatcctaatagattggacaagaagaatgcccagaataaaaagagaatcagcatcatgaagacactcctttctctttatttgttcgattccagcgttgtttcagtttgaaatgaaaggcgccatagaataaaaagatgatgacaatgattcctggatgaatggacagcacctgcagtccgataaaggcaagaagggatagagcgataccgaagatcgttccgaagcctttcagcgttttttgtccaaactcatatgccatgatgcctagcagaacggcaataactggtgttacggcgccaatcatattttgaatgatttgtgaggagcttaagacgctgacaagtgtgacgagtgccaccatggcgagacatgttggtaaaatatgagcagctgttgcgacaattgcgccggatacgcccttcaatcgatagccgagatatgcagacattttggtcgcgatcggacctggtaatgcattggcgatggcgagtgtttctccaaactcgtcatcattgatccattgatatttcaccaccgcttcatggcgaatgagcggtatgacggaagggcctccgccaaaaccgagaataccggttcgcaccatagcgatgatgagttcaatatatgattgcaagtgcttcaactcctgtctacaatttcatgcccattcggcttttgtatcgtttaatgagcatttggcagtccacactcacgacgccttctagcgggtatagcttttttgtcaggaatgcctccatttcctgttcattttgaaaaatgccatgcatatgcagcttgcttggccctgtcatgtgataaaggcttgtgacagctgtttcctgctcaagttgaagggctactgcttctaaaaatttcggttccacttctacattaaagaagacagagacgtgaatgccgatcttagcagggttaatcacagtggtgaatcgttcaatgacgcctgcttcaatcagctgctgaatgcgggcttgcacagctacacgtgaaagaccgacttgtttcccgagatctgtataggacatacgcccgtcctcgtgtaatagggataaaatttgtttatccctttcatctaatgttaggttcggaatgctatagtcgtttgacaccgtataaccacctttcttctgttggtattttatcatatttcattacgaatagaatgaatgaatttcaatttactaacgaaatgaaatatcatggagtgataaataatctttttgcataaaaagacaccccggaatcaacggggtgtcttcattttattgatctgggctgctttccgcactggcaatttgttgtgcaaggtcagctcgatcaatgtctgcttggaagaattcctgcgtatttggcagatgtaaattcatatgacgtttttgagaaatgcggatggtcacttgatcaacggtgtaatcaaatacgtgtccgccgacacttcgatcatcatcaatgaaatgaagatgatatccactcaccgcaataccatgtgcgtactgcggtgtacggaaaccagcgatcgttccttgaatatcctcgaaatcgaaaataggctgtgacttgactgcttccaccatcggaacgtaaggtttttcctgtttttcgaccgtacgtgtttgaacctttttgaatgatccatcaatgcggatcgcataaaaaacattcttactaggtaaaatgcggtcgatttcttcttctagctctttggacgtcatggttgcatcaattcgatgaacgatatctgtttcaaagaatgctagagagcagaatggtgaatagtcttgatcggtaaccggtgtcgctgttccatccgagcgcagtcgataaaatgcgccgtcaaagccgatcagctctccatctaattgattgaatgtaccaatgccgaaatcaccgtgcttgggaatatgtgcaagggagaaatctccatcatatacggcttccagtaaagaggtcatcgtcgatacttgataaacctcttgctgtttgtcatgttgtcttgtgtcgttctgttgattcattgggtgcatcatacccatatccgctcactcctttgatgtaatgtatggacatcttatctgacgttcaatgtgtgtttttcacgaaagacttctggccatttttgactggcgaggtctgggttgtcttgatagtcaatcggaatatcaataataacgggtccttctatgtttatacccttttgaaggacagttgaaagctcttcaggtgagttaacccgtaatccagtcgctccaaagctttccgcatatttcactaagtcgatctgtccgaattcaacgcaggatgtgcggtcatatttcatttcctgctgaaacgccaccatgtcgtatgtgctgtcattccaaacaaggtgaacgagatttgttttcatgcggacggctgtttcaagctccattgcagagaagagaaaaccgccatcacctgagaccgaaatgatcttttcatctggattcagtatggaagccgcaattgcccatggtaaggcgacgcctaatgtttgcattccgttgctcaccaggaatgtgttcggctcatagacgcggaagtgacgcgacatccaaatcgcgtgagatccgatatcacacgtgaccttcgtgtcatcaggaatcaggcgtcttaatgtatgaatgacattcagcgggtgagatagatgactgtctctttctggtgctttttcaatgtcgcttaacagctcctgtaattcagtgactaaatcaatttgttctttgcatagagaaagtggaacactgtcatgggctagatgtttaacggtttcagctatattgcctacaagctcaagcgctggctcataaaaatgatcaatatctgcctgcatgtcatccacatggatgatctggcgctgctgcggctgaatattccaatgcttcggatcatattcgattggatcaaagccgatggtcaaaaggacatctgcttgttcaatgagtagatcccccggctgattccggaataagccgattctgcctacatattgagactcaagctctcttgagagaacgccggctccttggtacgtttcgacaaatggaatcccaagtgttttcaataatgttctagtggcgtttgcagcagctggacgacttgctttcattcccacaatcgcaacaggtaagtgtgcattttgaattttggcgatggccgaactgatgagagcatccggtgcaggacctagttctggagaagggtgagcagacactggtgtttgtgtggtgtgttctgtcacgacatcttgtggaaagctgataaatgctgctccagcctgccccttttgtgccgcgcgaaaagcatttgttaaggcttcaggtatattatgaacgtcttgtacttcaacactgtattttgtgactggtttgaataatgccgcattgtcgagtgattgatgtgttcgtttcagccgatccgcacgaatgacgtttccagcgattgcgacaacagggtcaccttctgtattggctgttaatagacctgttgctaaattagatgcgccaggacctgatgtgacgagacaaacacctggtttgccggttaagcggccgacagcggctgccataaaggctgcattttgttcgtgtctgcataggacaagttctggacctctgtcttttaatacatcaaatacggcatcaatttttgcacctggaatcgcaaaaacatgggtcacaccttgagcaatcagcgtatcgacaatcaattctgctcctcgtcttgttaggggttgtgcttgagaattcatttaccccgcactcctttcggcaagtaaaattttttatgaaaatatattttcatgatatgatttactatacatttcaaaaagaaaattttccaatatatgtttaacgtggttttaatatgtttcacgaataagtgtgcgaggagtgaaaggatggaactgagacatttgcagtattttgtcacagtagcggaggagctgcattttggcagagcagccgcacggttgaatatgacacaacctccacttagtcagcaaattaagcagtttgaagaagaattggggtttcctttgtttcaccggtcgaagcgagtggtggagttaacagctgctggaaaggtctttttacatgaggtgcgtggtgtgctgcagcagcttgataaagccgttgatcatgcacggcatacagcaagaggagagctggggaaaatcatcatagggtttgttggaacagcgacgtatgatattctgccgccagttgtacgcgaattcagagagctgtatccctctgtcagtattgagctgaagcagctttctgttccgcagcagctaggggcgcttttaaatggggagattgatatcggttttttacatcctacatctccgcatgaagaacttgtcagccgtttgatgaagcaaagtgaatgtatttttgcgattccgaaaaatcatccgctggcgaaaaaagaggcggtcacgatcgaagatatccggcatgaaccgatcatttctttatcaaaggaatcatggccgtccctttatcaacactttgtcctgctatgtgaaaagtacggattttctccgaatattgtgcaggaagcagcggaatatcaaatggttattggccttgtcacagctggtatcggtattgcggtcattccaaaatcagcccggcgtttatttaatctagatgttgtatatcggtccattgaaggtgaacagcttctggcggaatggacgatttcctatagacgagagaatcataatcctgctttatttcatcttgtccaccatatcctgcatcgcaccgagccggaatcagaggcatagaaaaaaggggtatggtatgatgtcgatacaccaaaaggaggcgtgtctgaattgattacgttgcaaatggatcagctatcaagaaaagaagcatataaattattatcgggctctattgttccacgaccgattgcgtttattacaagtctgtctaaagatgatgtcgtcaatgccgcaccatttagtttctttaatgtcatcagcggacacccgccgctcctcgcagtttctatcggacgacgcgaaggtcagatgaaagatacagcgcagcatatgattgacaggggagaatttgtggtccatgtgagtgatgaagcgataatagaagatataaacgaaacagctgctacgctgccacaggaagagagtgagctggatcgaaccggtcttcatcaagtaaagagccatgtcgtgtcagtgccgggaattcaggaagcacgtattcgctttgaatgtcagcttgaaaaacatctgacctttcaaaatgatgaaggagagatcacggtcgatcatatcattggccgggttgtgtgtgcgcatttagatgaggatgtgtatgatgcagaaaaaggatatgtttcgactcatgaactaaagccagtcgcccgtttagcgggaaatgattacgcccatttagggacgtcatttgtgttgaaaagaccggaataataggaaaaacccccgagagctatcgggggttttgtgtttattttttctgttctagtttcagtggagctgcgatgttcttttctacttttttcccttttaggacgtcgtttgcagcgccgactgccagtttcccgatcagctctggctgctgggcgactgtggcagatagttttcctgctttgatcgagttgagtgcatcttcgtttccgtcaaagccaacgacgagaatgtcttttccagagctttgaatcgcctctagagcgccaagtgccatttcatcattatgggcaaaaacggctttgatgtcagggtttccttgaaggaggttttccatgacattcagtccttttgtccggtcgaagtcagccgcttgttttgctgtcacttttagatctttatccgctatttgatggaatccttttccgcgctcacgtgtagcggaagcgcctggtacaccttctagttcagcgacttttgctcctttaccgaccttgtcgatgataaagttagctgccatttcgccgcctttgacgttatctgaggcgaccagtgcttctacttttccgctttctgctgaacggtctaatgtgatgacaggaatatctgaagcattcgctgattcgacagcggttgagatagcagatgaatccgctgggttgatgagtaatgcgtcaaccccttgctgaattaaatcttctacgtcactggtttgtttagctgaatcattttgtgcatctgcaatgaccacttcgatgccaagctttttcgcttctttcgtcacaccatttttgagagaaacgaaaaatggattatttaaggtcgagatcgagagcccgattttgatgtcttttttctttccatcttttgttgatttggcccactctggcggttctagcgagcaggcagaaagcatgaataatgagagagtcagaatgagaatgagatattttttcatagcagctgcctccttaagcagatttctttctgtctagtaggactgcaatcaagatgacaatccctttcacaacagattgatagaatgatgatacaccaagtaagttcataccattgttcaagacaccgatgatgagcaccccgatcagtgtgccgacaattcgccctcttccgccagacaggcttgtcccgccaagtacaacagcagcaatcgcatcaagctcataggatgtgccagctgttggctgagctgagtttaggcgagaggtcaaaatggcacccgctaaagcagacatgaaacctgccagtgaatagatcataatttttacgcgcggtactttgattcctgaaatgagcgcagctttttcatttccgccgatggcatacgttcttctgccgaaaggtgttttatgaagcagcacccaaagtacgataaaggtgagaagcatcgtgatggctggaacaggaatgcctaagaaatacccgcggccgaataactgaaaggcatagttagaaccgagtcctgtaatcgggtttccgtctgtataaacaagtgttaatcctctaaaaatggtcatcgtggcaagtgttgcgataaaaggagccatttttccttttgtaattaaaagaccgttgaccatcccaagaatagcgccgatgatacagccaacgataatagctaaaatcgggtccataccagacacgataaatccggcagtcagagcactagaaagtgctaaaatggcaccgacagacaaatcaattcctccggttaaaataacaaacgtcattccaaaggcaatgagggcattaatggagatttgtctcagtaagtttaagatgtttaatggctctaaaaaggctgggtttaaaatagaaacaatggcgacaaggatgatgagtcctaagaatggcccaagcttttgcatgatgttgtcaaatcgtccatttgaagtaagtggtttcatgttacttccctcctgtagctagtgtcataattcgttcttgtgttgcgtctgatttatttaattctccgctgatggttccttcatgaatgacaagcactcgatcgctcatccctagaatttctgggagctcagaggagaccattaaaatggcaacacctcgatcagtcagttcattcattaactggtagatttctcgtttcgctccgacatcgacacctcttgtcggttcatctaaaattaagaccttcggctggatgccgatccatttggcgatgacgactttttgctgatttccaccagagagacttcgagcagaaatttcagaggaagccgttttaattgtcagtcttttgatgagcaggtcgacaaaatcctgttcgtttttcttatcaatcagtccttttggagagaagctttctaagtttggcagtccaatgttttctcggatggatgcatccagcatgagtccttcatctttgcgatcctctgtgataaagccgatgccgagtttgacggcatcacttggttttttaatgacagcctttttcccatggacccagatttcaccttgatcaagaggatcaagaccaaacagcgaccgcatcatttcggttctgccagcgcccattaagcctgcaacaccgacgatttctccagctttgactgagaaactgatatcatggaattgtccttttcttgtcgcttgcttcacctcaaggacaatatctcctagagaaggcaatctctcagggtatcgatctgttaattcgcggccgaccatttttttgacgacctcatggaaattcgtttcaggtatggctttcgtatcgactgttttcccatcgcgcatgattgtaatccggtcacagatcgcaaagatttcctccatacggtgagaaatatagacaatggatacgccttcttttttgagagattcaatgacctgaaagagcttttcaatctcacggtctgttagagctgctgttggctcatccatgatgatcaccttcgcatcagtcattaatgcctttgcaatctcaatcatctgtttttgtccaacagagcagctgcctgcctcttgatcaagcgagaggttcacagacaatcggtccagctggctttgggcaagaaccttcattttctttgtgtctagcaatccaaacttcgtatagatttctttcccgatgaataggttttccaagacggtcatatccggccatatgttgagctcctgatgaataaaggcgatgccgtgttgttccgcttccttcggatttttgaaagcggtttcttttccgtcgatttgaatcgttccttgatctaatgaataaagacctgtgagcaggttcattaaagttgattttcccgcgccattttcgcccatgagcgcgtggacctcacctgtgacgaggtcaaaggagaccccggaaagaacggtgttttttccaaaggccttatggatgttatgcatctcaatgttcatatctggctcctccttttaaaagatgacaccggcatgaagaatgcagtttgcgtatggggtggcttcacccgtgcgaatgactgcttttgcctgcttggtcatgtttttgaacgtctcgtggtctacatcatgtaatggctgtgagaacgctttctttagaaatagatgatctcgctcattggcttctttgatttcactagccacagtaatgtgttcaaccgccatttcctgaagaaggagagaggtgacctcttgaaaggacggtgtgccgattgataacgccaggtcgattttgactggaccttctggaataggaagaccgcagtctgcgatgacgattgtatctgtatgaccaaggtcagcaagtaccttggcgatatgactgtttaagatgccgttttttttcatttctttttctccagttcttctcttgttggcatgccgccttgtgcaccgaactttgtgacagacattgatgctgcaaggttggcataggcaagtgcgtcatagagagatttgccctctgttaaggctacagccaaggctccgttaaaggtatcgcctgctcctgttgtatcaactgcttcaacaggaaagcctggaactagcacttctttcaatccgtcaaaaaatcgaaccccatttttcccttctgtgatgagtaatttgttagggtattgacgcaaggcgtcttcaattgggagtccatcaaacatgagaacagcttcgtgctcattcggtgtaatataggcagcctggtctaaaacctgctgcgatactttgcgggcaggtgcagggtttaaaatcacagggatttctttgtcgctgcaaatggagcagacagcttcgactgtttcttcaggtatttcctgctgaacgagaactatcccaatatcatctattgtagaaagtgcctctctaacatagtcaggagtgacctcgtcatttgctcctttgaccacgacaatgctgttatcaccttctgctaaaatgatatgagcggtgccgctttccatttcggtaaccggtttcatatatggggtgcggaccccttgatcttgtagattgctgacaatatcctgaccataagcatcatcaccgactcggccgaccatgtatacatctgcaccgagtctggcacttgcgactgcttgattggcgccttttccccctgggacggttttaaatgattcgcctaacaccgtttcaccggcatttggccgtttatccgatgtgacgactaaatccatagaacagcttcctactacgacaatatgactcattgtgaatccacctttcttgtggtctctcgttcaataaaagagacgggcatttggataactggttgatctataggttgtttctgaatcgctttgattaacagctgtgccgcttcttttcccatctcataggcaggctgcctaatcgtagataaggaagggaagagcagctcgctttgcggaatatcatcaaacccaatgatttgaacatcatctggaatggcttttccgatccgaagcgcttcgtgtatgaccgctgttgcgacgatgtcattgctggcaatgatgccatctgtttcagggtacagctggaaaagagccttggcgctcttgcgggcttcttgaaaggaaaatgaagcattagacatcacatgaaagtcgactcctttttccgtcagtacatcgagtgcgcccttgaatcgctgcctcgctgtttgaaggtgggcaggtccttttagcagtgtgatctgccggctgccgcgtctgattaattccattgcggccattttcccgccagctgcagcatctgcaaacacagaaggtgcatgtggaacggttcgatctaagaacacaaccggtaattcatcatcattgtatatatctgattcaggttcgtttgtgacagcgatgacaccgaccacttgattttgtttaaaggtttgtaaataggccatttccttctctcgatcttcatcactgtttccgaataataatcgaaaaccatgcgcatgaatttcgtcctcaacgcctctagcgagctgagggaagaagggattcgtaatatcaggtaaaatcaaaccgattaagcgtgattctcttttgaaaagggatctagccacttcattgggaaagtagttcagctcctgcatcgcttgtgtcacgcgggtttttgtatctgtatggacatatccagtatcgttaagcacgcgtgaaacagtggcaacagacacttgtgcagcttttgcaacatctttaattgtagccaatggagtgcctcccttcgtcaatgtgtaaccgtttacacaaataggttatcacgaaagcttttaaatgacaatcttaaaaaaataaaaaaagaaaagaaagatgctatcttccttttattaactagtaatccctgtttctgtaatattcactttgatttttgggatgatttttacatttggataatcagttttccaattcatttttacatattcatcataatttttaacgcgatactttcttccaagacttaacacgtcggagtttgatttctgcaaaacagagattactttttctgcttcctttgtgaaaatagctgataatcgtttgtttagttcatcgatctttttcgtactatctaaattgtctttcggatattcaacgacagctgttttgaattcgaaatctagcccaattgtcacgtttcgatgatcagaattgagaatacgaatatctcgttttaagtcggtgacttggatggtaatatagttatttcccttcaactccatatcatttctgatctttttagtgaaatttgcatatttcccgattttattattcatgagattgagaagcatggcatcttgaccataaagctcaccagtttttttctcattatcgaataaagccacacctgctactttgattagttgtttagactgatcaaatacaattaaaggcagggtaaagtcttctcctgtttggagcatctttgagcgtatgctttgaatatttccagcggtcacttgtgaacctcttgaggcagttgtaatgagattgtttaaatagtcactgacaatgagctgttcttttagtaatttgttgatcacatcaatgcttgaaccgcctttcacaacggctaaattggcaagcaaaggacttttcggatcgcgatagaacatgtctaagtagggaagaagttgattttgagagaattcatcaccgatcagtaaaatcctcatttttgacatatcaatcttttggtcaaccattcggccgaagtctgttcccgctttacgtaaagttggagcattggttgtcagtacagtggttgaataagtacctgaacttccttgctgcatactttgagactgttgtacttttcggtaggtaatcgatacttttgcgttatcatcttccccttgatcaatggcggaagtaaggacaagggagatgttttttaataggttttgatcccagcagccaggcatcatggtgagagacacgcacatgaggagagtcaggacatatttatgacgcatgtgatttcaccttctttttacgttgtttgataaagataacgatcgccatgaatgctggaagtgtgtaaatgaacgaatactgagcaatcgttgtaaaatcattgaaacgctgaatgcgaaagttatcgactgccaaaaaacagctagacgcatatatcagaatggcgaaacaataaacatattttttgtgatcctttttcttcagtaaactggaaatgccatttgcacaaaagtacagatagttactcaatgtggcaagaataataaacacccagaagctaagaaaaattaaatctgtccgctcaatgataccgaaggaaatggtttttaataagtaaagaacagggttgggaatcacatcaagctcaattggactaaaaaacataaaacaaatcaatgtaataaataggtagtaaagcgtcgtgcatatatttgaaatggtcatgattttataccgttccttaatagtgcctttcataaagggagaaagaataaggatcatctcaaatccattcatcgataggacgacgtccttcagcccaagctgaaactgagaaatgtctgtttgaaaaaaaggcatcagataatcgatattggtcccttttaatgaatagaacatcagcaaggaaagcaaaaggagaaggggagttaagataaagttaaacctgacaatggctgtaatttgctccttcgcaatataaacaatggaagtaatgagtaatagattgatgacccagtttggcgtcagcggcagaacccacataccaataattctggtgaaaatggataaaacgacaatacagacggaggcaaaatacagtatatacagtgcaatcagtaatttcccaatccattgaccaaatacatcaattaatgcttggaagaatgatgtttctggatatttatgaatgatgtaaatgaaaattgtattgatgatttggataaaaaaacaggcgacaatgatcgccatccagccatcgtgtcccatgtctttcatcaaaaagtgggggagcgataaaataccgacaccaatttgagattgaatgagaaaaaagacagcttgaggtggagatattttatttttcatttttctttttccatcctctcaaatgttcaatttgctttttcttttgcggatttaaataaacagggcgatttttgtacatccacattgggaggcgaattacagtatcttttaaatcctgccagttaaatggagtaacaggtgataagtatggtacccctagtgattcaaggcggcataaattcatgagaatgatggataatccaaatgaaatgccaataaaaccaaacattgatgccatgaacatgagcgggaaacgcagcatcctaatggtggccgtcatttcaaatgatggaaggacaaaggaagcgacagcggtcacggcgaccacgatgacaagaacatttgagatgagtcctgcttgtacaacagcatccccaatgaccaaaccacctacgataccaatggtttgaccaattggtctaggtagacgcacccctgcctcacgaatgagttcaatggtgatttccattagcatcgcttctatcaaaggaggaaatgggataccgataattgaatttttcatcgttatggctaattcatctgggacgacctcataatgaaagccaatgacagcgatataaaaagatggcaaaatgactgcgatgatacaggcaagatagcggagaacacggataaacgtagccggaatccagcggctattataatcatcaggtgattgaaagaagctaaagaaggtgacaggaagaatgatagccatcggactgccatccatcatcaccacaattcgcccttcaaggattgcagatctcaccttatcagggcgctctgtatcaataagctgcgggaaaatagaaaatgaatcatcctcaatcgcctcaacaatagagccaggacttagcagcgtgtctactttaatagaagaaatccgtttgtttacctcttctaccttttcttgattagcgatatcagatatataaacagtcgcaagctttgtttcagattttgtaccaatcttatgatactgaatggcgagctttcgatcatttaaatgcgaacgcagtaagtagatgttggtatcaagactttcaacaaatccgtcatgtgctccagcaataatactttcagatgaaggttcagaaatagagcgcagcggcggctgaccgacagaaaacaatttgatctgtgaggaattttcatcaagaaacgcaatgcttccagcaataatactgtctgtaatcagcgtcaagtcaccagtttcgagtgtactgagagatttcgtatattcctgctttccaggaggtcctaacaagttgccgataatgaaatcatttaatttgccttcatctactcttgttttaataaaaaacaggacagatttcgtttcattcaccattaactctcggtattcaaaatccccgctttgctgaaatgtttttttcagaatccggattttttcctcgaagctgcctgataaaaaatgcaaccgtgtttgctcattgctgtttggcatctttagcctcctctcacagattttttaaccttagtgtaagcggagaagctgattttattcgtcatctttggggaaagcatgacatgaattgacaactttcaactaaaatcatattaaaaatgttaagaaatgatgaatcttgataaaaacaaatgaataatgtttcattgtttaggtcataaggagcgaatatcgtaaaaagcaggtattccgaaatgatcaatagtttacatcttatcccaattttttgtgacccgaaaataagcatatgacttgatttttttagaggtgacctttgtcataggtcaacgcgtagcattctgaccgatgaggatgactttctaacctgttccttcaaaaatcgaaaacattccaaaacacgcactattcatttaaagcgctgatatgactgatgttatagagtttaaagggctttaaaacattgattcaaaatacatcttaataattgtcaaaaaatttagggagaaaaggacaaaagattttccgatgcttgatggtaacgctttctcttgattgaagctgaaattcataccaatttttgtccgccttttggccttttcatttaaagaagagctaggcaaatccgccttctgattagaggaatttggcatacgaggaagtgaaagattatgttacataataccgattgtgattttatgctgaacatatatactgttgattgaatttacatatcacactcataaaaaaaggagatgtagataagcgatgtggttaatcgttatagcctgtgtcatcatgttagggattggctttattgaaaagaagcgtcaccagaaaaatatcgatgccctgccggtgcgcgtcaatattaatggtattcgcggaaagtctaccgttacaagattgacaaccggtatcttaatggaggcaggttataaaactgtcggcaaaacaacgggaacagatgcaagaatgatttattgggatacgccagaggagaaaccgattaaaaggaaaccgcaaggaccaaatatcggtgagcagaaggaagttatgagagaaaccgttgaaagaggagcaaatgccatcgtcagtgaatgtatggcagtaaatccagattaccaaattatctttcaggaagagctgcttcaagcgaatattggcgtgatcgtaaacgttcttgaagatcatatggacgtaatggggccgacacttgatgaaatagcagaagcctttacagcgacaattccttacaatggacacttggttattacggatagtgaatatacggaattctttaaagagattgcgaaaaaacgcaacacagaagtcattgttgcagataattccaagatttctgatgagtatttacggaaatttgagtacatggtcttcccagataatgcctcacttgcacttggtgttgcacaggcattaggaattgatgaagatacggcattcagaggaatgttaaatgcgccacctgatccaggagcgatgagaattcttccattaatggacgcgaaaacacctggacactttgtaaatggttttgcggcaaatgacgcatcatctacattgaacatttggaagcgtgtgaaagagattggatatccaacagatgaaccgattattatcatgaactgccgtgcggatcgtgtagatagaacgatccagtttgcggaggatgtacttccttatattgaagcaagtgatcttgtcttgattggtgaaacaacagatccaattgtgaaggcatatgaggatgggaaaattccggctgaccacttacacaaccttgaatatcaatctacagaagaaattatgaatatgcttgagaaaaagcttcataatcgagtggtttatggagtcggcaatattcatggtgccgctgaaccgttaatcgaaaaaattcaagaatacaaaattaagcagcttgtcagctaggaggaaatatagaaaatgttcggatcagatctttatatctcgttaattttaggtgttctacttagtttaatctttgcagaaaaaacaggaatcgtaccagctggacttgttgtcccaggttatctggcgcttgtatttaaccagccagtctttattttagtcgtcttatctgtcagcttgcttacgtatgtcatcgttcgctttggtctatcgaaatttatgattttatacggacgcagaaagtttgctgcgatgctaattacagggatcgccttaaagcttgtatttgatttcttctatccagtggttccatttgaaatagcagaattccgcggaatcggtattatcgttcctggattgattgcaaatacgattcaaaagcagggtcttacgattacccttggaagcacgttacttctaagtggtgcaacatttgccatcatgtatgtttactatctattttaagataaggtgtgtccaatgatgaataaaaaattgagctttcaggaaaagctgctgaaaatcacaaagaaccaaaagaaaaagacgaataaacacgtactgattgctttaccgattgtcattgcttgtacatttctatttacgtttatcgggaaagcacaagtgccaactgtacaaaagaatccagaaaacatcctgaccgcttcgtttgtcggtgacattatgtttggaagaaacgtagagaaagtaacagaccgttatggaaaacagcatctctttcgttacgccaagccatattttgatgtgtcagattatgtgactggtaactttgagcatccagtcgcatcagataaagaacaagcggcacaaaagaatattcatttgaaaacagacgaagattctgtcaaagcattgaaggatttgaatttctctgtattaaactttgcgaataaccatgcggcagactatggtgaaaaagggctgaacaacacgattgatgcctttgaacatgctggcatggattatacaggcgcaggccgtaaccttcaggatgcgaagcagaacatttcgtacaaagaagtaaatggtgtcaaaatcgctacacttggttttactgatgtgtatgggaaagattttaaagcaacgaatcgccaggcgggtatcttgccagccgatccatctatctttattccgatgatctcgcaggctgctgaaaaggcagatatcgtcgttgttcatgctcactggggacaggagtacaacaatgaggtaaacgatagacaaagagaattggcaagagcgatgtcaaaagctggtgctgatatcattatcggtgctcatccgcacgttcttgagccaatggaagtctataacggcacggcgatcttctatagcttagggaactttatttttgaccaaggctggtcaagaacacgtgattctgcacttgttcagtatcatctgaatgaagatggaaaagcgacatttgaagttgtcccaatgtatatcaaggaagcaacacctgctccggttaaagcaggatcttttgaatcaaaatccattatccgtatgctgacaaatggtacgaatgcggattggaaagaaaaagacggacacattttctttgaagtagatcacgctgataaagttaaacacttaaaagaaaacggagggaaagagaagaaatgaaattcctaaaagcaagctggccgtttgttgcgttaattttagtctttgtctttatgtctgcttttaaatttagtgacagcctcacagatcatgaaaaacaaaagatctcggttgaaatgcagaaaatcgaacagcaaaagcaatcaaaaacggaagcaagtaaataattttaaagagcatagagggcgcgcattgcgtgctcttttttgtcgaaaaaaggtgtaaaatgaaaggtgtcatgccgaaactatagaagaaaggaggggaaagatcatgaaatggaaaggaatgttgattggtgggtgtgtgctcgtagggctgatgttcatgtctcaatcagaagtatctgctcaaacagcgtctcctttggagcaagcggaaaagctgattggaacaccttatcataaaggaggaaccgatccaaaaacgggctttgacgcatctgggtttattcaatatgtgtacaagacatcaggagcatttgatttgccgcggaaggtgatcgaccagtatcagattggggaaaaggtatcatgggacaaagcccggcccggtgaccttgtatatttccgcagccttgaagaaacaaaggatatcccgacgcatgtggcgctgtacgctggtaacgatcaggtcatccacatcacgctcagtcagggtgtggtgaaaacagatgtcagcaaaagcaaatactggacggaccgattttatgcagtcaaacgactgcccggcacaccagaaatctctgatgaccgtcttgtgaaagatgcgatgaaatatgtaggtattccttatgtatttggtgcagcagaccctaaggttggctttgattgttcaggctttttacaatatttatttgaaaaatcactagggatttatttacctcgaagtgctgaacagcagtggatggttggagaaaaagtggcattagatgatatacgtcctggggattttgtcttttttagcaacacatataagccaggcatttctcatgtagggatgtatattgggggcgatcgttttattcatgcgagccgttcggaaagtgtcacgatttcttatttgtctgaatcgtattggcgcgagaaatggacaggtgcgaaacgattaacggacctgaaattatcaaaagaagatccggttgtctcaaaagccgctacgtatattggtgaagttccttatgtcaaaggcgggacgaatccagaagagggatttgacacagcagggttcacacagtacgtgtatcgagaagtgcttggtattgatctgcctcgctatgcgtcaggtcaagtcaagacaggtacgcctgtgaaacgttcggagctgaagccgggagatctcgttttctttagtggaacgtcattgatgccggcgatttatgcagggtcaaatcaagtcattcatgtcaccgtctcaaatggtgtcgtgcttacgaatatgaaaacaagtacgtactggaagaataagtatgagacggctgttagaatcaaaaaataaagaaaaagcccgatccacgctcgtatcggacttctagacttctctctaggcgctgatcagactagcgtctttttttcgtggaattgattttgtaaaagcagatcaataaagtaagcaacaccgtcttcatgattgccttttgtgatgaaggtgctcttttctttaataacatctacggcattccccattgcaatgcggtggcctgcttcctcaaacatggatagatcgttggggctgtcgccaatcgcataaatatgtgagcggtctacgccataatgagctgcgagctttttgagagcatgtcctttcccagactcttttggaagtacctcaatgatatgttttccagaagaggtcaatgaaagctcaggcatttccgcgaggagatctcgtgcttcctgtagtttgttcatatcaaatgagaagcagagtaatttataagtcgcttcattcgactcaaaaatctggcgaatatcatccactggtttgatgccgaattgtttgaattgagtcattgccccttcccataaatcagctacatcctcatttgggttcgcacttttgatcacatcaaattctgctttcagcttctcttttccatcaaaaggagagaggagcgcatcgtccgtgtagacctcaaagtaaatgtttcgttctactaatgctttagccgctcgttttcctgcttcttggtcaagtgtgatacggctgaaaagttcataaccttctgtatgaacggttccgccgtttgccgcaataatagggatgtccaaatcgccaagcagttccttcacatcaaaagtcgcccgccctgtacagatggtgacaatatatcccgcttccttcgcacgaatcaatgcctcccggttttgagcagatacttcactttttgtatttaaaagtgtaccgtctaaatcaatcgcaatcatttttttcatcgctgtcaaatcctccttcatgcatgcaatagcctctataaagtatgtacgatttccttcattctcatgagcaataggatggttgttcctctctatcaaggctaaacaaaaatgaccgaatgatcaagagaataaaacaaagggctaaaatcaacatcatcgtcaacaagtagaaaagcgcccccttagggacgctttctgtttatgataattcaagctgcttcttcaattcagtcttcacttcgtttagctggttttgatccaattggtaataataaaccccgtttggctggtaatcagagcctttaagctgaatggtatcgaccgatttcaatgacgtcagaagcgggaacagcccgactagctctttcattgaaagattggttgagacattctcaccaagtgtatcaatgatattgtcatatgacggaatagacgttaacgattttgatttatcaaaaatggcttttaatacttccatttgacgctgtccgcgcattaaatcactatctgcctttcttgttctcacatatgcgagagcttgatcaccgtctagtgtatgagttcctgtttgaagctgtaccttgccctttgtatcttttagaacctgtttgaccacatattcatccttgacgttaatagagactccgtttagttcattgacgatctctttaaatgctttgaaattactctggatcacaaaatcaaccggaatatctagtaaatcttcgactgtacttaaggttaaatctgcaccaccaaatgcgtgtgcatgtgtaattttgtcatagccatgccctggaatattcacatatgagtcccttggaatgcttaataattttacggttttatttgtacgattgacggttgctaagaccatcgcatcgcttcgtgcttgtttcactgtttcgcccggtctgctgtcaatgccaagcagcaagacagaaaagctgtctttcccaggatcgaatgcttcaatccgtttcacagattgtgcaccgcgatccagagatacttgcgcctttttggcagcatttgtcactttgtagtaggcatagcctgtgacagaagcggttgtcagtaaaagaataccgactataaatagagtgactttcacccatggctttaaacgcttttttcctttgcgtttgcttcttgattgatccatatattttaaaccctcgctatgatttttatagtaaagatgtccttctttttgcttacaaactaaaacaaatataccttaaaacgggatatagtgcgacatttttttcactgacgcttaattgacgtttccttatcgtaaaaagtttcaatgatacttcaaatgaaatatatttgtcataaaacattgaaatgtttgaaatgacaggaagtgaggaaaatgattttccatagagaaacatccagtacatacagaacaaaagaggggttatgaacatgaaaaatcggaatggatggctttatttcttcggcgcacttggcggcgccttatatggctatgatacaggtgtcatttctggcgccatcttatttatgaaagaggatttagggttaaacgcgtttacagagggacttgttgtcagctcgattttaatcggagcgatgctcggttcctctctttctggaaagctgacagatcaatttgggcggaaaaaagccatcatcgctgcagcaattttgtttattatcggcggatttggtacagcccttgctccgaatacggaagtgatggtcttattccgaattgtactagggcttgctgtcgggtgctcaacaacgattgttccattatatttatctgaacttgctccaaaggaatcgcgaggagcattgtcctcattaaaccaactcatgatcacatttggtattctactcgcctatattgtgaattacgctttagcggatgcagaagcatggcgcctgatgcttggaattgcggtcgtgccttctgtgcttttattatgtgggattttatttatgccggaaagtccccgctggctgtttgtccatggacaggcagaccgtgcaaaagagatattatctaaactcagaaagagtaagcaagaagttgaagaagaaatttctgatattcaacaggcggaaagtgaagaaaaaggcggttttaaggaattatttgagccgtgggtacgtccagcattaatcgctggtgtcggtcttgcctttctgcagcagtttatcggtaccaatacgattatttactatgcaccaaaaacattcacaagcgttggctttggcaattcagcggctattttaggaaccgtcggaattggggcagtgaatgtcgtcatgacgtttgtggcgattaaaatcattgaccgtgtagggcgtaaagcgctgctcttatttgggaatgctggcatggtcctaagtttaattgtcctgtcagtggtcaatcgatttttcgaggggtcaacagctgcaggatggacgacgattatttgtttagggctctttatcgtcatctttgctgtcagctggggtcctgtcgtttgggtaatgcttccagagctgttcccagtacatgttcgaggaatcgggacaggcgtctctaccttcctccttcatacagggaatttaatcatctcgcttaccttcccaactttactaagcgcgatggggatcagtaatcttttcctcatttatgcggtcatcggcgtaggtgccttcttatttgtgaaatatatggtgactgaaacgaaagggagaagtcttgaagaaattgaagacgatttaaaaaagaggaaccgtgccttcgtagatgacgaaggaaaaacggtgtgaacaatgaccagctgcccgcatgcagctggtttttctttgttaaacaaacgtttaatcaagaaaggacaatctctcatcttctgaatgtgctgcatatgacatacatatggaacaggcgagcgaaaggtggaaatgagatgaaagggaaaacgagcattgtcatgctgacgtacaatgaactgcatttaacgaaaaaatgtatcgacagcatcaagcagcatacccgaagtgaccaatatgaactcatcatcgttgataatgcgtcaaccgacgggacgaaggaatatgtgagagagctgaacgatgtgattttcatagaaaatgcagaaaatcgaggctttgcaaagggctgtaatcaaggagcgaaaaaagcgacaggggatagcattctctttttaaataacgacacgatcgtaacggaaaactggctttctccattaaaagaggcgttatttgcatcagaacgtattgggatggtaggacctgtctccaattatgtgagcggtcctcaaatggtcgagccatcgtatacagatgtgaaggagctcccagcctttgcgaaaaattatacggctgcgagaaaaggtcagagaacatatgtacatcggcttgtggggttttgtctgctggtgaaaagagagctcattgaagaggtggggttatttgatgagcggttcttgtatggatcatttgaggatgacgatctttgtttgagatccttgctcaagggatatcagctgcaaatcgtccacgattcatttgtgcatcatcacggtcatgcaacctttcgtgcgaatcaagaaacgaacatctctacactgtttgctgagaacaggcttcggtttttagataaatggggcattgatctcaatctgatgaccccccatccgtactttgcggctctgctgcctgaagacgctgcatgtgtacttgatgtgggatgcggcgcaggggccacagggcttgaactaatgaatcggcagtctgttgacatgtacggggtagaggccgatccattaaaagcagcaatcgcaaaggcatattacgaagaagtcatcgaggcaaaagcggatgagtacccatggttagagaaagaggccttttttgatgccatcattttttctgatgttttagagcatgtgtcagatccttggaacatcattgaacaagcgtacgcatctttaaaaccgggcggcgtgatcatttgctgcctgccaaacatgatgcatgcggaggtgcttctcccgttaatgacaggggattttacgtatcaagatgtagggattttagaccgaacccatctgaggttcttcacaccaaacacgatgcgtgcgcttttcccaaaccatttgtttgaacgggtgatcgagcagcgcatcaatgttcagattgatcagaacgtccaattgttttttgacgaggtggcgagagtaggagcgtcacttggctttcaaacaaaagcgttgtctgatcaagtgaccctatatcagcttttaattgtcgtgcgtaaaaaaggcggctccccttcgagataaccgccttttgcattaccatttgaagctttttgttgcgccttctgccccaaagtttaaaatgctgactttgacatcatattcgatatccgcttcttgaaagagcgtatcccattcgtttcgatgcttttcccaatagtcagggtatttaatacgaaactgccggcttaaaaatatgggatcaacgcccacctctttttgcacatgatggactgctttttgaattcgctgtttgattttattcgcaaaaagaagctcatatcttttgatgtactgctcatcgtatgaattttctgcagggtactgatcttcagagagctttccttgggtgttgacattaattttaaaggaaatatgtccatccttcagatagggttcaatcttggtttttgatttcttaatttcatacgtgatcggaaagtctttgtaggtggcaggtacaacgccgcctgaaattcggtccatcacccaatttaaagattggacatccttcgcagggatgaagccgatcagctttcgtgtttttccatcaatgattcctgctccatcataaatcagttcaccgtctatcgcatctacactttggacaaggaagctagcgcccatctggaagtaatcagatgcccggccaatacgggttggcagcaaaatctttccgttaaagcttcggtttttggatgtttcaaagatatgttcaaccggaaccttttgctgtgatttcaatttttggttgatcacttttgacgcatcatctcgtgacacgagaaggtagctgcttcgccgaacctcatcatctcgtataaagtggttgagcgttccttgaatatcgtgatgctctgcctgatttttgccgaacaagaaaatttttagatgatcactatagatcggcgggtcctttaaggcgacattactgacagcctccagcacatttttcccttttgagacgacattcacatggccaggagaatcagcctcttgtgtcccacccatcttcggaaccaggttttggtaggtgagcttgactcctttctgatcttcctcgtcaatgccaatgccgcgcacaaatgataatttttcaatatcctttaaatcccagcaccctgctgatagaaggaaaagacagcaggacaaaaaaaataacaacaaacgccttcttctcatgcagaacgacctccccattttttacgtatcatcaacagaacagctgtaataaaaggaatggctaaaaccgcgaacaatgagtagccgagtaaagtagagtagtaaaagacttcattgatatttttcggaaaaagggagagtgcagaggtaattaaaaacagcagccatagcagtctcgtaatactggttgtcttaaagaccgtgtgacagcctttaatcgcaaattggaaaaagccaagcatacaaatgaactgctggcaagtccagatcgtcagtaaaaaaatatcaaatcgttcaatgaagaccccttcaagttctagtgcttgaatgagtgagacagtgggccaggtgagggatttcgtttctccaacggtcatggaaccaatcacaataaagagcgtgagagagtagataagtgaggtaattccgaccccgatcgcagcggcccatttcgccttcgaccatttgtctttataaatgagtggtacaacaaacaaaatgacctcaaagcctgtaaattgaataaatgtttgagagaacaaattactgaaatctttaaacccgttcgccatcaccgggcgtaagtaatcaaaatcgaatattttcaaactaaacagcatgagcccaatataaatgatcatcgtcatcggatatatgtatgtcaccattttcactattggaaagataccacttttcaaatgatagatcgccacaagaagaaaaatcatcacaatcactgccatgggagtcgattgcagcaggaaaaactgaacaacctctccgagaacacgcgcttcaaagccgacaatgcctagtaaataggcaatcagcattaaattaaagaacgtgccaaagattgcaccggctcctttagtatttgactcaaaaatggtgtctggtgcattcttttcagcaatccatcctaacaaaaaagcaacgaaagcaaagatgactccctgtattaatacaatgatccagccatcagggaaccctgaattggcagaactgcgtggaatagttaaaattccagcgcctatcattgtagagctgcacagaatggtgacttgtaacaatgatagcttctcagctctgtacatcgtttaatctccttgtcttttgagattttttatttttgctgttttcggtctcgatttaaatagcccaattggtaaacgtacgtacgtatcctttaaatctgaaaacggtgaagacaaaacaggtgtgaaatagtcaaaaccaaaggtctttaattgcatcaggtgacaaagcacaaataaataacacatgatcaagccatataacccaaacatcgctgaactgaaaatggccataaagcgcaagatgcgcagcgggaaactaaagtcatacgaaggggcagtgaaatcggccaaggcggtcagcgacacaataatcaccattaaggcactgacgatattggcttggacagccgcctgaccaatgatgacgccgccaatgagcccaattgtctgcccgatggctctaggaagccgaagtccagcttctcgcagcagctcaatcgtaaaagacataagaatcgcctcgacaacaggaggaaacggaacattctgccggctgcctgcgatggtgattgccattcgtgttggtaataaaccggggtgatatgagacaagagcgatgtagagccctggtaaaaaaatcgttaacagtacggcaaaataacggagtaggcgcaaaagagtcgcacttgtccatctttgataataatcctccggtgattgcatcaaggctgtaagtgtcataggcatgatgagggcaaaaggtgtgccgtcgagcaaaatggagactttgccttcaagcacagatgcaatcacccggtcaggacgttctgtattttgaatctgcggaaaaatggagatgtggctgtcctcaatcagctgttcaatatagccggtttcagggatgtcatccattttgatttcggtcatgcgtgatagaacatcttctactaatttgggatcaacaatatcacgaacgtacacaagggcagcagactttttattgcgagtacctacatttaccttttgaatgacaaggttagggtcatttgcccgctcacggattaaagctgtgtttttttcaagattttcaataaaaccgatccgcggccctcttacaaggacttccgattgcggctcttctacttctctaaattgaaaaagattcgtttggagcgcaagcgcttgtgttgccccatttacaaataaaatagccctgccgttatataactgctcgatggcaaggttcatatcttccagcacgtcattttgaatgccaaagaacgttttagacagggacggaagcgtagtagaatcaacctcggtgatgttcagttccttttgcatgggtgaaatgatttgcttggaaagcatctcaaattctgtgagtccttcaacgtacatgagacatgcagagatagcagaagggccaaatgaaaaagagtggaacacgatatcatcacttttcccggcaaagcttttgacgcgcttgatgacggacgctatatcttgttcaatacgacttttcataatacctcaccctcatgtcatgttttttatagagtgactcggaatgaggagaattatgcaaatagaaaaaaagagaatccctgcaaataggaattctctcgtctgtttatctcgcaagccagccgccatcaacagctaaaatatgaccgttcatataatcagaggctggtgagctaaggaaaacagcagcgccggctagatcctcaggcttaccccagcgcccggcggggatccgtttgaggatctcttcatttcgattttcatcgtctcgaatggcttgcgtgttattggtcgcgatgtaaccaggagcgatcgcattcacctgaatatgctgattcgcccattcgtttgcaaaagctttcgtcagccccgcgacagcatgcttactcgctgtataagcagggacaaagacgccgccttgaaacgatagaagggaggcgatattgacgattttcccttgcccatttttcagcatctgctgtccaaccctttgagtgaggaaaaagagactattgatattcacatccatgaccgtatgccaatcttcctctgaataatgagcgacctgctctcttttaatggttccagcattattgattaaaatatcgatcgtatgcttttttaacagggcatcgacagcctgctttgccgtttgaggatcggaaaagtcaacctgaaccgcatgaaacgagcggcccgcctgttcgactaacgctttcgtttcctcaagcggtgtgtggtggtatgtgccgataatatctgcgcctgacctggcaagcgccacagcaatgccctgcccaatgccggttccaggacctgtcacaagggctgttttgccttcaagagaaaagagggacgctacataggatgctgttgtcatcacattacctcagctggtccattgggacaaagtccatatctttgaacgtatagttctcacccgccatcgcccaaataaatgaataattcgctgtacccgaacctgaatgaatggaccaggcaggagaaatgacggcttcctcattggccacaacgagatgtcttgtttcagatggctcccccataaaatgaaagacacgagcatcttcttcgatatcaagatataagtacacttccatacgccgatcatgaatatgagcgggcatcgtattccacgtgttattggtttccagctgagtgattcccatcatgagctgacagctttggatgccgtttgcgtggatgacttgatacaggtttcgtacgtttgaagcagacgcttcccctaagtgattcggtgttaattcagcgatggctgctttttgcgtagggtacgcttgatgagctgtggctgatacaagatagaacttggcttcttcgcctgatgaactagcaaactgtacatcttcgtgtccaagcccaatatataagaaatctttgtgctccagtacaaaggcttcaccatcgacagtgaccgttccttgaccgccaacatttacaatgccgatctcgcgtctttcaaggaaatactccgtacgtaaaaagtcaccggcatctaatttgagcggctctgcagacggcatgactccgccaatcaccacgcggtcctcatgcgaatagtagagctttaattcaccgctgacgaatagtgtaggaatatgaaaatgacgacgaagttcctctgttgtaaaacgtttgacctgctcagggtgtacagcataacgattttccatttgaaataagcctccctttccatttgaaacaaaatattggtattttatttggtatcggtttcaaggaaaattttagaggaaaaggagagtgacgtcaaccgttatttcgaaatcgctttctttttgtttatttagaagattttttccatcttcaagcaaaaaaatcttctggaattcaagaaattatgatatgctctttttaagttatttgaaatcggtttcgaaacaaatgagaagatatcgattgtgggagttttttgaatgaaagagaaaaagcaaacgaaagtgaccatcaacgaagtggccgcttatgcaggtgtttcaaaatcaactgtatccagatatatcaatggcagaacaaatgaaatttctactgaaaaggtcaaaaaaattaaaaaagccattgaggaactgcattatcgtccgagtcagctcgcccaaggtttgaaagtaagaaaaagcaaggtcattgggtttattgtagccgacattacgaatccattctctgtagcgacacttcgcggagtcgaagaaatttgtgatgaatatggatacagtatcatggtatgcaacacagataaccgaccagaaaaagaacgggaaatgctcctcaagctgaatgcgcattatattgaagggctcatcatcaatacgacaggccataacaatgacattctgcaggattttaagaaaaacggtgtaccgattgtccttgttgaccggaagttacctgaactaaaagtcgacacagtgacaacgaataaccgtgatatcacgatccggctgcttcaacaaatgtatgagaaaggctatgagcacatcgccttctttactgagccggtcgatggaatcagtcctcgtgaagaacgaaaagaagcatatgaacagacagccatgagtaaacataagccgtccattattacagaaattgatttgaagaaaaaggagcaattgcgagaagagcttgtccgttttgtacaactaaaccaacagaaaaaagcgattttagcagccaatggattactcatgctgaagctgataagtgaacttgtagagcttgggataaagattccagaagagataggcattgcagggtttgatgatacagaatggtataagctgattgggcctggaattacaacggttgcccagccatctcatgaaatggggaaagccgccatgcaaaaaatcaagactcggcttgaaggggatgaaagtgccccccaaaccattcagcttgacggagaaatcatcgtaagaaaatctttataaacaacagacagagaagagtatacatacgtgcatactctctcttttttaactaatttgaaaccggtaccaagaaaggggagaaatgagtgaaagcattggatgcggtcacatttggggaatcaatggcgatgttttttgcaaaagaagccggagagcttcatcaagtgcatacattccaaaaggcgcttgctggcgccgaaagtaacgtggcagtcggtttggcgaggctaggttttgatgtgggatgggtgagcaaagtcggagcagattcacttggcacatttattttagaagagcttcaaaaagaaggggtcgatacaagtgcagtgatccgttcaaatgatggggctcaaacagggattttacttaaatcaaaagtgatggatggagaccctgacgtcacgtattatcgtaaaggctctgctgcgagcacaatgagtccaagcgactttcccaccagctatttcaaacaggcaggacacctccatatgacaggtattccgcctgcattatccagtgaaatgagagcgttttctttttgtgctcttcaaaaaatgaaagaagcaggcaaaaccatttcatttgatccaaaccttcggctgcagctatgggaagaggaagaagatatgatccatacggtgaatcaaatggcttttcaagtggattggttttttccggggcttgcagaagggcaaaggctcacaggctgtcacgagccggaagagattgccgatgtttatttgcaaaaaggcgtcaagcttgtggtcatgaagctcggtgcagaaggtgccttttataaaagtgcagccagtcaggggattgtgagcggattttatgtgccagatgtcgttgatacagtcggtgccggtgatggatttgccgtgggggtcatcagcggcttattggacggtttatcatatgaaaaatctgtgacaagaggcaatgctgtaggggctcttgcggtgatgtctcctggcgataaagacggactgcctactcgggaagagcttcaggcttttatgaaagaagccaaacgatatcatagacgggaatatatgaagggagatgaaggatatgggcaagtcagcaagtttgagcgttaaagagcagctcgcggcttgtaagctgatcgcagtggtgagagcggggagtgaagcagaaggcattgagaccattgagcgtttaaagaaaaaaggcgttcgagccattgaagtgacgtataccacgcctaatgctgaacacatcatcgcgtcctttcagcatgagcaagatctgattgtaggagcaggcacaatcacaacccttgagcaggcacaatcagccattgacgcaggctcacaatttattgtcagtccaggatatctccctgtgatcggagagcatctctcatttcacgacacactctatgtaccaggtgtcctcaccccaagtgaaatcatgcaggcaaaagcagatggctactgcttgctcaagctttttccaagcggttccttcggtttatcctatatgaaaaacttacaaggtccgtttccagagattgaatttattccaacgggcggtattcatccagccgatgtgccaaaatggctgaaagcaggtgcagtggcagtaggagtcggaagtcagcttgaaagcagtacagcagaagagttacaagcggtactttcttcataaatagttgatatcaaacgaacaactggcggatggatgccggttgtttgttcgtttatctgacataacagcaggtgaatgctgactcttcacgtacaatgatcgtgaaggagtgatagacatgtacattcaacaagatacactcacggatggacaaatagagcagctgattaccgctcatatagaagaaatgaaagagcattccccgccagaaagcattcatgcccttccgttagctgatttgaaaaagcaagatgtcacagtgtggagtgtgcgggaaggagaggagcttcttggctgcggagcgttaaaggagctgtcaagtgatcacggcgaaatcaaatcaatgaggaccgcagctctccatatgcgaaaaggtgtagcaaggtatatgctgaaccatcttctccaagaggcaaaaaggcgcggctattcacgtgtcagcttagagacaggtgcgatgtctttcttcgagccagcaagaaaactatatgagagtgttggtttttatatttgcccgcctttcgattcatatcaagaagatccaaacagtttatttatgacaaaggaattatagaggtcgagagagtatgcttataagcagctcttttttttatgcgcaatatttgaaagggggaggatgtggtgaaaagattaaagtggatcgggatgggcgcctttctcactttttgtgtcgtatctgtcatttttttaacattattaggtcaagatttatttaaaattgaaagcgcttccgaaaaagcgtcatcaacctatcaatatcactttgtccttgtaccggaggaacttgataatgaatattggcagctggtacaaaggggagctgctgatgcgtcagccgttcatcacgtgtatctagaatatttgggtccgaagcaagcagatatagacgatcatctgaaaaccattgatatggcgatcgcagggcatgtcgatggcattatgacacagggacttgatgcgaaaaaatacaaaccgctttttcagaaggcgagggaaaaaggcattgatgttgtcaccgtcgatacggatgcagaggggagcaagcgtcaagtgtatgtaggcacggacaattattattcaggctttatcgcaggacaggcactcatcgcagatacaaaaggcgaacagtatgtaggaattgtcacaggcaggcttgatgccgttcatcaaaagcagcgtgtcaaaggatttcgagatgccgtcgccgctgaaaaacgtattcatattgctggaatagaagaatcagccattacgaagtcaggggcctccggtgccgcgtataaactattaaacgatcatgcgaagctcaccgcattttacggcacgagtgcattagatggtgcaggcatcattcaagcaacagcacaatatcgatcgcccacagatttttatgtgctcgcatttgacacattgccagatacgattcaggcgctcgatgatggaaagattgatgcagtggttgttcagcatccttatgaaatgggctatcaagcagtggaatcgcttgtgcgtttgcagaaaggtgaaaaagaagaaccactccagtacacaggaacgagtgtgattcggcgcgaggatctgcctctgcagcaaacagacagaaagcagggtgtgcagccatgagaaggattcgaagtaagctgttattggcatttttaatccttgtgctccttggcaacgtggccgcttttttcgtctattggagcagctcgaatatcacatcagaatatagcagaagctttcgttcttttctcctgcttaatgatatatcgacagaggcaaaaacgatgtatgaaaaggtcaatgcgtatgcgattgaaaaggatcggcagtttgccaaagaatatctggcctcaaaacagaaaatgaaatcctataatcaggcattgcgaaaggatgccgggcttcatgcggcgattccttctattgaaaaataccaatatatgatgcggacgctcatcaatgaaagtgatgcgaccatgacacatgtaaaagaagggaaaatcaaagaatatgcagcaagtgtaaaggaggtgagaaccgtctcctcctacatacaagagcaaacgatgactctgcttgatgatgaattgtctgagtatcaagtactctatcaatctctgcaaaaaagacaccaaacctatgcactctttaccttatgtttgtttacgctatccattggggtcgcattatggatggcgtatatgattgctggagggatatcaaggccgatcgtccatctgtctcgaagcgtaaaggaagtatcagaagggaattttgatggagcgcacttgcatgtcacctcaaaggatgaaatttctgtattaaatgaggcctttcagcgaatgcgtcaagagatgaaaatgatgattgaagagatgaaacaaaaggcagccttagatcaaaaaatcaaagacatgaagctgaaaacgctgcaaaaccaaatgaatccacattttttatttaatacattaaacatcgtctcacgcatggcttacttagaatcagcggatgccacatcgaggttgatccaatccgtttccacgttgatgcggtattcgctgtcagctctcagtgcatctgttacgttggagcaagaagtaaaagtggtcaaagaatattttcatatacaagaaacaagatttgccgatcgtattacatgcaaaacgaccatagatgaatcatgtttatctgtacatatcccaagtctcaccttacagccgcttgtcgaaaatgcctttattcatggcgttgaaccaaaggaggaagacgggcttgtcgaactctcgatctatcaagaaggcggctatgtgatgattcggattcgggacaatgggatggggatcaatgaacaagagataaggagattgctatcagaaaaagaagaggaaagtccaaacaccttgagtaaagggcactcgacagggatcggtcttcgaaatgtgatgtcaaggctgcatttgttttacggggtaaaagatgccctacaaattgattcaaagccaaacgaaggcaccaccattcaattggctattccgatgaaggagggaccggcatgctgaacgtgctgattgtggatgatgaaaaaatagaacgactagcgatgcggaaattcatgaccgattggcttccagagtgtcatatagcaggagaagctgaaaatggaaagaaggcggttgaattcgtgcgaactgagcccgttcatcttgtgctcatggatattcagatgcctggaatggacggattgacagcgatcaagcagatcaaagcgagcagtcctcatacaaaattcattatgctgacagcgtacgatacgttcgattatgccaagcaagcgatgcaggaaggggtgaagcaatatctcgttaaaccggctgacaaagatgaaaccatcgccgccattcgaacggttgcggcagagattcagcaggaggcgtctcagcggcaggcggtggcggctggtcagcagtcaaagtggctcgaagctcatgtcataaatggtcagtcctatacctccatggagtttcaacaaatgtttcacgaatatgaagcaggtcttgtcatcgctgttcagcggacaatcggggatcagctgttgattgatttacagacatctcctctttttcatacggtaccgattcaggtgagtggtgagctgtttacatgtctcatttatcgccaccaagcgcctggtcagttaaaggcagatgtcctacatgcgattcgaactgccacaacaatcgatcagccttcacctgtcgttggcatgggacacccggtctcaaacccgctttatcttcagaaaagtgcagcagaggcgaagctttcctattatcagcgaaaaaagagtcccggcgttgttcgttatggtttttaccaaacagaagaacagtcccatccaatgatccatctgccggagcttgcagacgatatgatgcaggcactggaagaagggagaagagaggatgcgctggctttattcgatgcctttgaactggagggagcgaccatttcacaactaaaagagctgctgattttatttaaatcacggctccgaacagactggccaatattaacgatcagcaccgcagctgaatgccgtgagtgctgtgaacacttatttgacgtgtacgaagcgagaacccagaccgtgaatgacattgagcgggcaaaacgctacatcaaaacgcatttttgtgaacagatcacgcttgagcagactgcggcctatgttgatttaagtccaacctatttcacaaagcgctttaaagacgagacagggctgacatttaaagagtatgtgacaacctgccggctggataaaatcaaaaagcttctcaaagacagctcgcttagtttaaaagaaattacctatcaggcaggatatacagaccccaattacgtcagccgtgtgtttaagaagatggtcggctgttcaccgaaggaatatcgaaaacagaccgtaaaaaagtgaagaatttcataaaaaagtgaagaagtttgctgaaaaaaagcgaggatctgccattatacttattttgataacgcttacaaaatggggatgggggatcaatcatgaagttcaaattaggttttacgctgttagcgctctgtatgcttatcgtcactgcctgtagttcatcgaccaactcagatgcaaaaaaagagggcggagcagagaaactagacattttctcttggtggactggagcaggtgaggaggacggactgaaagcactcattcaattgtttgaagagaaaaataaagacatcccaatcgaaaatgcagctgtcgcaggtggtgctggtacaaatgcaaaggctgttttgactagccggatgcaagggaatgacccgccagctacgttccaagtacatggcggagcggagctgaatgagagctgggtcgcagcaggcaaaatggagccgctggatgatctatatgaaaaagaaggctggaaggacaaatttccggaatcactcatcgaccttgtcagcaaagatgggaaaatctattcagtaccagtgaatattcaccgaggcaatgtgctttggtataacaagaaggtatttgatgatgcaggcttagagccgccaacgacctttgatgaatttttcaaaacagcagatgccttaaagaaaaaaggcattacaccgcttgcacttggtgataaagagccttgggcagcgacgcatttgtttgagagtgtgctgctcggcgttttaggcgctgacggatatcaaaaactttgggctggcgacatgaaaatggatgacgcaaaagtgaaggaagcggcagacatctttgggcgtatgctcgaatacgtcaatgatgatcacagctcccgtaactggcaggatgcctcgcagctcgtggcaaaaggggaagcagcaatgaatgtcatgggcgactgggcaaaggggtactttgtgaatgatctcgatctgaaggtgaatcaagactttggatacgcggcgactcctggaaccgagggaagctttatggtgatcaccgatacattcggactgccaaagggcgtgaaacagccagaaaacgtgaagaaattcttatctgttttaggatctgtggaaggacaggatgcattcaatccgctgaagggatcgattccggcacgtgtggatgcagatgtttctaaatatgatgaatacggaaaatcggcgatgaaggcatttaaagaatcgaagctggcgccgtctctcgcacatggttcagctgctgaagaagggtttgtgacaaaagcgaatcaagccgtgaatatcttcgtcacgcaaaaagacagcagccagtttgtttcatctttaaaagatgcaatgaaataaagacgaggaggcggctaagcaccgcctcttttttgaaaaggagtgtagcttcatgcgcatggacacatcgccgatcacaaaagcagcaacacctaaagtcaaacgtgttcggaaaaaatggaatggggatcagctgcttgcgctgctatttttagccccgtcggctgttttattattcatctttgtttacggctttattggctggacagggtatgtgtcattatcaaactggacctcgcttgttccgaatttctcttttgcaggtcttcaaaattatatcatgctgtttcaagatttccgctttcagtcagatcttcgaaatacggtcttttttactctattttttattggagccgtcattgcctctggactcgcacttgcgattttactagatcagaagatcaagggtgaatctctatttcggaatttatttttctttccgatggccctttccttcgttgtgacaggggtcgtctggcaatggattttaaacccgtcaactggggtgaatctgtttttaaaaacgcttggtatccagcctaagtggtacacggatacgaacattttagccggatttgtctgggggaaaattgagtttggtgtccctgcggcaatgattgcagtcgtgattgcagcggtttggcagatgactggattttctctagcgatgtatttggcgggtttgagaggaattccagaggaagtaagagaggctgctagaatggatggcgcaaccgaatggcagatttaccggaagattatttttcctctattgaaaccgattactgcaagtgtcattatcatcatggctcatatttcattaaagattttcgatttgatttactcgatgacaggaccgggtgcaaactttgtcacagatgttccgggcgtttacatgtttgaaatgacctttagaggaaaccattatgcaggcggtgccgccattgcgattgttatgctgatctctgttgctgtctttatcgtgccgtatctcctgtcgagccggaagggggcgtcatcatgacagctagatggtttgtccgtccagtcctttatgctttattgattttgtgcagtcttttttttctgatgccagtctatgtcatgctcgtcacaagcttgaagccattaggtgaagtgacccttgagaaaatgtgggcgctgccatcaacactcgatttttcaagctatcaaatcgcatttgaaaagctagcgcccaatttaatgaattcactttatcttgtcattccggctaccttattgtcagctgtactaggagcgatgaatggctatgtcctatcaaaatggcgtttcaaagggtcagaagtggtctttacgctgatgctgtttgggatgtttattccatatcaaagtatcctcataccactcattcaatttttgcgtgaagtcggattgtataattcgattccaggtctggtgcttgtccatgtcgtatatggactcccgatcacaacgctcatgttccgaaacttctatgtgagcatccctgatgaaatgattgaatcggcaaaaatggatggcgcagggtttatcgggattttcagacatatgattcttccgctttcgatcacagggtttgttgtggtcgccatttggcagttcacaaatgtgtggaatgagttcttatttgcagtcacgatgaccactgcggagcatcagccggtgatggtcgccttgcaaaatctatcaggcagtcaaattgtgcaatggaacgtccaaatggcaggggcgatattggccgcactgccgacacttgtggtctatattctgctcggaaaatactttgtcaaagggcttctcgcaggctctgtcaaaggatgaaatatttttgtgttatcgttttcatttggtgtactgaaaggattgacttctctttagatagcgtcataataaaagttgagacttgctagttttcatcaagcttggcaaggattatcaaagggtagcaaagggaggagtcatcctgaatgaagcagtcaccaatttttttactgcctgaattgaaggagagaatatggggaggtacagccttaagggatcaatttggctatgatattccttctgatcaaacgggagaatgctgggcaatttctgctcatccaaacggaccaagtgtcgtgcaagacggtccatataaagggaaaacgctgatcgaactatgggacaatcacagagaattgttcgggggaatagaaggcgatcgattcccgctgttaaccaaaattttagatgcaaaccaagacttgtccgttcaagttcatccggatgatgattatgcggaaagacatgaaaatggcgagcttggaaaaacagagtgctggtatatcattgactgcaaagaaggagcagaaatgatctatgggcacaatgcaagaacaagaactgagcttgtgaccatgatgaacagtggagattgggaaggtcttttgcggcgtgtgaagattaagcctggtgatttttattatgtgccaagcggaaccattcatgcgctgtgcgaaggaacgcttgtccttgaaacgcagcaaagctcagacacaacctatcgggtatatgattatgaacgaaaagatcaggatggcaatgaacgtgaacttcattttgtgcaagccattgatgtcacaacggttcctcatgtagacggttatacagatgaatcagttgaaacacgccgtgggctgaccattcgaacttttgttgaagcagagtatttctctgtgtataaatgggaaattgatcaaacagtagagctttcgcaagattatccgtttttgctgtgcagtgtaattcatggagaagggtctttaacgcatgatggacatacatatccactgcctaaaggagctcattttatcctgccggctgaaacagggagcttctcaattgaaggaacttgtgaactgattgtgtcgcatatataaaggaaaagaggacttcgaaggggtcctctatttttctattgcataaatgacttgaaagagtacttgtttttgtcgataaagagattagtagactattatgcaaagttaagagagggacagggaacgtgaaaaaaaccatcaagattatgttactcgcagctgcctttggtatgacagtacagacgggcaaagaagcgcaagcagcctcctatgtcgatcaatccatttatacgatgaacacctcaaaggtatttacaacagaatcagaagtgaaaaaagcagtggaaacattgaagaaggacaaaaagtggacagccacttatcaaacctcaggaaacacgtcgacctatcagctcactgcctcaggatatgagtcgcaaacagcagcgagtgcaagtgcagctgcattaaaaaaagagacgggcatgagcggtacggtgtctccagtaggtgaccgcctgcctttacaaaaggtcgtatctgacccagtcaatgatgaagctcaggcaaaaaagctctcgctcgagctaacgaaaacatcagggctcaatagcacctatgaagtcatcaatcaaagcagaccttcttatcaggtcatatcaggaaccattgattctgaaacgaaagtcaaaaatattcaaaccgaattacaaaagcaggccggtgtcaccagtacataccaaactgaaaataaagctggcactgtgtatcagctgatttcaggcggtatcgttgggcaaagtaaggcgaataccatcctgcaaggctttcaaaaggagtctggtttaaaagcagtgcttcaaacggtgacagcaggcaagccatattacatcgtcacatcagctgcacaagccagccagtcaaaagcacagacgctccttacccagctgcaaagagaagcaaagatcagcgggaagattcaaaagacaggcgctttaaaaaatgtttatcgcttggaatcaggctatttcaaagacaacaaacaagcatcctcagctgcggctcagatcaagaaacaaaccggcgctgcagggactgtgcagcgagtgggaaaaacaaaaaattatatcgtgaaactcaatcaactgaacgatacagcatacggaaaaacggtagcctttttcaagaaaaagaaatggcgctacacatccaaaaagatctcttctacacagccatatcaagtagtgactggaaacctattaggagatgatcaagcgaaaaaagcagcggctttcttccaaaagaaaaaggtatatacgacaacgaaaaaaacaggtaaggtatctgacagcacgtatcgacttgtcgtcaatcaatcagcagaccaagcgaaaatgaataaaggtgccgcatatttaaaaacgcagaaggtgacaagcagcatcacaacaggtaagggacaagctgtcagcaaaacgtatagtctcaagacaacacctgtatatgagcaaagtaaagtcaaacaggctcaagagattatcaagaaaaacggcgttgccagcagtacaaaaacgctgacagaagcggttaagcaataccggatcacgacagagccgacggtgaatcagacaaaactgaatcaagcgttaagctatttaacgaaacaaaaaatgaaagcagctgctcaaaaaacaggtacaactgattatggtcaatatcagattaaaaccggtgtcatttccacagctgcattgcgcgaccaaggcctggcttttttcaaaaaacggaatgaaccagctgcttataaaacaacaacgaaaccaacctacaaaatcaacattacgcagcaattcacaggattaccaactgtaaatgcggcgattgcttttgtgaaaagccaatatggctggacagccacagccgtaaaaatcaaaaatggcccaatggtcatgcaaacgaactacaacctcactgtcaatgagatggtgaacaagcaaatgaaggtgtcaccacagacagacggtgcagcctatgtctatgcagcatatgtagacccggcgacgtcaactgtgaatacagacggcttaaatgttcgttctacacctgattcgagctctgcaagcaacatcgtggcgcagctgaacaaaggaacaaaagtaagacagcttgggaaagaaggaaactggatcaagatcagcttgggctggagaaatgcaagttcagcagaggtgcaaaaatatgtagacccagccaatattgctgagggcactcaatcttattttcaatttctgaaactctctgaagctgcgaatctcaatccggcagaagtcaattccaaaattctagcaggtaaagggattcttgcaggtaaaggacaagcctttattacggcagcgaaaacgtatcatatcaacgaaatttatctcatttctcatgcgttgcttgaaacgggtaacggaagttcgattttagcgaatggtacgatgtttaatgggaagaaagtatataacatgtatggcattggcgcatacgacagcaatccgaattacctcggtgcaaagtatgcgtatgaacaacaatggttcacgccagaggcagcgattattggcggggcaaaattcattggcaacagctatatcaatcacgccacatacaagcaagatacgatttataaaatgcgctggtctagtgcagcgactcatcaatatgcaacagatattggctgggcttataagcaagtcactcgtatgtatagcttgtataacttacttgataactatacgctctattacgacatcccggtttataacaaataaaaaaacgtccgtgcttcctaatgagaagccggacgttttttgtgtaagagctgctgttcaataaatgatagaagctgctgactagactcgccctttgaatattggttccattcctcagcgaaggttttgattcgttctctgtgatctgattcgtttagatgaagcagctccttcaagagcatgtcttgagtgacgcaagcctttccaggaatgatgtcctcataccgatcgactaagccgcgtttcgctcgataagtgtctaagtcataagtgaagaacaaaacaggcttttcaagcagcgcatattcaaacacaatcgacgaataatctgtcatgagtacatcgcaagtacaaagcaatggatagagcggctgatcggacacatcaaatatccattcaccgtctgtttccgcctttgctaaatgtttgaccgcaggatgaagcttgacgagcagaatatagtctccatttagctctgtttgcaattgctcttttgaaaaaggcaggacaagatcgtccattgcaaagtctcgataggtcggtgcataaagcaggatctttttccctttaggaaaatcattcggcttcaaggaaggcaggcactggtcaaagtacacatccgtcatcggtacacctgttggtaaaaaacgttcatcattgaccccaaacgaagacttgaaaatctcgcgcatgtgatctgagcctgtaacgatataatcgaaagacgcatagactcgtttaaagcgtttgatatcacgtggacttcgttccgaatttgatgcatcttcaagaccgaattttttcaacgccccattggcatgccatacttgaatacaggtggtagaaggccgttttctgagtacacttgtcatgagaaagtaattatctgtcacgacaaccttgcttttaaacatcgtataaatacattgaatgagatggagaggatttttttcatgaaaatagcgaaatgacagatgagacccgtccttttctatcgcagaagcatgcttcgtatagaggactgtaagcttcatcgtcatgttcgcctgttgttgataagtatcaatgagagcagctgcattctcttgaaatgaaacaagcagcgtcacctggttttcacgcggtttcacgccgctcatcagccatccaattaaagaaacgaaagctgcatagcatgaaatgatcattgagcgtatattcatcattggtcagtctctcacagctgcttcgtctgatcctttacttgctcaggatagtaacgtttttttcctttgttttctttcaatacggcaaaagcgtatttaggaatgttcagcattcgtttccatctccatggattcacaacaagtctgtacagccattctgtatttgttttaatcatccatcgtggtgcacgcttcaccgttccgctaaatacatcaaagcttccgcctaaaccgatgcaaacagcctgcgggaataaatgacggtattcataaataaagttctcctgatttggataacctaaagcaacgaacaccatatctgctttcgagcgggcgatttgcttcgctacgaaacgtttatcggcttgatagccgtcacagctgcccgcgatgaccacatttggatattccgtatcaattcgctgtttaacagcctcaagcacttcttttttcgccccatataaaaagatacttttagactgcttgtttgctagatcaagcatagacatgaagacatcaaagccagcaattcttgacttcagcggactttgtgtcaaacgtgacatcaagacgacgcctacaccatccggcagaacataatccgcagaagagacgacttgatggtacgcacgatccttcataacagcatagccaatctctggattgacagtcgcaatcatggcgcctcttctttgagaaatatgatggtgattcatatagctgataaattcatctaggtcgccgtttacataagaaaggttagagaccacttctgtttgcattgtttagacctcctttttcatcttgttatctatgaacgttcattgtaaattcattcttcgtctactcatcattttatcacagatgctccatgaaatattaacaataactttacaaacctttaaatttcatgacattttcatcaattcatatgaaggatgctgcgagaaacattgattcttcggactttcccttctccgcccaataaattggaaatagtttgtctttacatctgcttaacgtttgatgggcgctgtgatataatgaggttccgaagagcgaaaaaatacgaacgatgataataggattacggataaacattactgcatgaaagcagttgaataaggaatgaagaaaggagttcatgtttgcaatgaagaaagttattacttacggtacatttgatttattacactgggggcacattaagctgctcgaacgtgcaaagcagcttggagattacttagtggtggccatttcgacagatgagtttaacttacaaaaatcaaaaaaggcttatcatagctacgagcatcgaaagctgattcttgaaacgattcgttatgtagacgaagtcattccagaaaacagctgggatcaaaaagtccgtgacgtgcaggagcacgatattgatgtgtttgtcatgggagatgactgggaaggtaaattcgatttcttaaaagagcattgcgaagtcgtgtacttgaagagaacagaaggcatctcgacaactcaaattaaggaagaaattgctggactttaattatttaagatagtgcttcttatcttttggtgagaagtgcttttttatgttaacatatcgtttaaaaatttatttaaatatcgacggaataaatggacaacaatgaaaggttgagtgttttgatccaaaaatggtttaacaagcttagaaaaaagacacatgataataatcaaagtcaaccacaacaacaattgcaaattcctgatatggagtactactttattactggaagaattaaagaaaaatatggtggtatgacgaagtcattattgctacgtgcgaacttatttgggttaaagaatgtttcaactcattttttaaccttttcatatgatcaagaattttctcagaaagtgaaagggatcattgataaacagaaagtggatcctaaaatgacaaaaatccaaaatatgtatgtggattttcttattccaaattgtaaaccaaaggaacagtatcagccatcttatcacgctgacgacatcaataaagtggtatgtgatcaagaagatccttctgttcgttttattaggaatgaaaaatctaatcaaattgagatggttgattattttcttccaaatcagcaattggagaagcgagaggaatataattcacaagggcagttgcataaagtttcctatttctctcaggaaactggaaatgtctatcgagaactattcatttatgagcacacttatgtttatatgaaaaaagagtatgcggatcttaaggaagaatctaaaagtaaattgagagacatcatttggtatgcccatgaagggataaaaacctttaaaaatgaaaaagcattaagacaagagtggattacgactattcagtataaaaatgatcgaaaaaagctctttttagttgatagccggaaacaggataagtatgtgttccaattgaaaaaaagaagttcttcttatttttcagcaattattcacagtaaacactatgaaacagaaaagacagaattacgttctgattataatgaattatttacccaaataagaaaacaaaaagtagatgccgtcttttttatcactgaagagcagaaaacagacgtagagaaacaatttggtcatcaaaatatcttctttttaacaccacatacattagatcgttcgtcacatcaagtacaagatcactatactgcggatccgaataaggttctgatgatggcgagattaactaaaataaaaaatgtcatagatgccatccgttcatttgaatttgtgataaaagaagtaccaaatgcgaggcttgaaatctttggttcaggtcctcaagaaaagcacctaaaacaagaaattaaaaggttaaacttagaaaagaatgtctttttaaaaggattcactcaaaatcctgatgctgaatttagaacagctagaatgtctatctctacctctgtctttgaaggctgtccattgtccatcatggaatcaattgttaacaattgccctgtgattacctataattacgattatggtgctagcacacttgtgaaaaatcagtttaatggctttgttgttgagcaatatgaagtgaaacagcttgctaacaaaatcattgaattgttgaaaaacgatgaacagtatcagattttttcagaaaattgtcaggagattgcagaggtatattcaatccctaactattatgaaaactggatagcggcacttcacaaaatgatagaagtgcgagaaaaaagagaccaaattcaaaggatgatgaagcctattcatttcaaattagtgaaaattggtgttgaacatcatattctttcattggatttgcaaatggaaggtgtcattgaaaaacgaaaaaaggttatattagaacttgtcggttatgatcggcgtaaccatgctgagctattctctaaaaaagtcgaaagtttaaaggtgtccttcccaattggacatgcatccatacaagcggcattgaaacgaaacaaaacaaaatatgttgatttctatatgagaatgagagacgaagaatacaacgaaatcaataagcgtttgccaattgccgagcatttactcaatgaaaaagatgtgtcaaaagttgacggtgtttcttacaagacaattaaagggaattattcttggaaggtgaataaataaataatagaaacttttatttatcatacatcgttttataagtatgagaagaagcataagatttcgatgaacagaggagataaatgattaatgattgaagagagcgttcagaagaatagtgttgttgaaagtttaaagaaccacgacgaaaaaatagaaattttattgaggatagatgatgataggccgttagaaggtcgattattttacttactcatgagagaaaggatctcaaagcaggaagtttaccttcctcttaaacatctagtggaaaatcagtttaaaatagagattcatgaagattctttctcgaatcaaatggaagaagggcaaacgtataacttatatgtgacggatttttctgaaatgactgatagcagtgagagcgaagatgaaaccgaagactcctcatatgattccgatggagatgacgaagaggctgaattggaagagggagatggccaattcctagatgaagacgacaatccctattataagcatcgtctaaagcttgatgtggaaatgcctgaactctgtttcatagaaaataaaaacgctctgctgcttgctgtgccatatcgtacagataaaggtaatgcttctattaaggtcaagcgagagatgaagatcacgaaaacaaaccagatagcactcgatgagaccaatcttcttactgtaagtggatattgtggtgtcataagtgctgagcactcttatcgaatcaaaaaaatccaaattcttttcaaaagggacgaagtagagcatcgattccccgtaaactatcagcaaaaaagtgatattgatggttatagaacggatggggagatgccggaagtatatccattcaatgttgaagttcctttaggagtattaacctattctacagacgagagatatatctatagaatgtattttgaatttatatgtgaagttaacggaacagaagagactttaacaacaccatctcttgtgcttggagatcggtctaatcaattaaaagggctcgtccaaatacaaaagaagaacaatgtcccgattcggtatgaggtgtatcgaaagaaaaagagacaaacgcttggtatccgaattaatgattatacaatgaaaacacgtgcgaagtactacgtcaaaagcaagtggaagaaattcaaaaagaaaattggcaaaatcaaaaaagtccgtaaccgccttgtgacaaggaccttccaaacgacctttaagatggcgagtaagctgtctgtgaaaaagaaaacggttgtttttgaaagctttaatggaaaacaattcagctgtaatccgcgtgggatctatgagtatatgaaagaaaatcatcctgaatatacgttgatctggagtgtgaaaaaagggcatgaagcaccgttcaaggaaaaggacatctactatatcaaccgtctatcattgaaatggatttttgcgatggcaagagccgagtattgggtcgtcaacagccgtttgccgctatggattccaaaaccagagcatacaacatacttgcagacatggcacggtacgccgttaaaacgacttgcgatggatatggacgaggtgcatatgcctggaacaaacacgaagaaatacaaaaagaatttcacgaaagaagcatcgaattgggactatctcatttctccaaatgcttactcgactgaaatctttacacgtgcattccaatttcaaaagaccatgattgagtcaggatatccgagaaatgacttccttcataatcaaaacaatgaagaaacgatgagagcactcaaacaaaaaatgaacctgccgcttgataaaaaattgatcttatacgcaccgacatggagagacgatcaattttataaaaaagggcagtacaaatttgatttagaccttgatctgcatgagctaagagcagctatcggagacgaatatatcatcattttgcgtatgcactatctagtcgctgaaaactttgatttaggaccatatgaaggctttgcctatgacttctctcattacgaagacattagagacctgtatatgatatctgatctgctcatcactgactactcatctgtgttctttgattatgcaaaccttaaacgtccgatgctgttctatgtaccagacatcgaaacatatcgtgacaagctgagaggcttctacttcgactttgaacaagaagcacctggacctcttgtaaaagagacagccagcgtcattgactgggtaagagaaacagaacagccaacctttactttgccagcttccttcgcaccgttttatgaaaaattctgctatttagagagcggggagtcttcgaagcgtgtggtggaagtagtgttcgataaaaaggctaggacataatctcactgaaccccatgtggttgaattgatgtaattaagacaaaaacacctttaagttgaaacacttaaaggtgtttttttaggtattatcatcaaagaaaaaagccagtcgattatctcgaactggctacaggctgcttatcaatgtactatctactataagactaattagaatagttttttttgtgtatgtttctttttaaatgtctcttaattgtcttaagaggttttaaggtatttcgagctttattttttaacacttttatttttttgacgcttatggtgaaaatataatttcgaactagagtttgaatggtcgctatctttatattttgaagagtttctttagaaactctagttaaggaatcgattactgaaaaatcatcatcttttaaagaagatatttcattgaaaattctttcgcagtttttattatcagtatacgttagaattaaatctcttctttcttcgacaaataatttttcgcggaaattattattaatcgtatgaataatctcactaactaagcttgtttgatcttctacaatttcgcctaggaacgtttcttccttactccttaaaatccccttattgaaaaattcatcaaaatcaaaatgataataaataactggctttttcataaaactcacatcaaatgaaacactagaataatccgtaataagaagagaggctctcattaataattcttgaacattcacttctcccaattccaaaatagaaactacatcactcttatatttgttgaaataagatatatatggctgcattcggtaatgtggatagaataatagtttcactctatgttttcttaattctttaagaagtttttcgtctttcagaatcgaaatatacttctcgtaataatccgattttaagaatgtttcttctgtattaagccattccctccaagttggcatgatcaaaatctctctatcacgattatcattggctgtcttagaattagctaaatggtcaaatctagataagccagtcaccttaacctctgattctttgtaaccaaagtgatccatcatcattttcttttcataaattgagctgacacatactatatgaaaaggatattgatagaaaaaccggtggtattcggctgactttctccccatcacaccatgttgaagaaaaattctttttgctttcttcgtatgctgatactgtggtattttaaacggaagaaaatattctaggtcatgagaaccgataaagtgtgtagcttgtaatgttttttcaatatgttcagttgatccaatgatcagtacgttcccaaggtgttcaatatttcgaatatctttacttccttcttctatagcataataaactttcttatcggggtgcttttctctgcaatatttgaaaaagtgatagcctgtatcttgagcagtatctggtctttcaccaatgatccagacttcttctcggccttcactaatttgatcttcagaaatagctgatttaaagggaagtacttctagttttaaatttcccttaggtgttgttgacgaaaagttgaaaattttattatcatcgttaccttgatacttgattatagaaaagtacttgtcttttttataggtatatttaacaaaccctagacgtctatcaaatgaaaattgatctgtatcgaatctaacaaagaaatcccacactcctttttcttcaggaagtgtggaagtatcaaatagcactttgaacccacagtacgtgtagtctttcttatcccgtttataatgataagcaaaagttaagtctcttttattttgtacggggataattatttcttttaatgatgcgcgttcttttagtatcaatgagcgttttacagattctgagttaggcatttctaagcctcttaaaatagcagcgccttcaatttttaagtagtgaccacgtatttttttgacttgatagagatttcttacggttctagctttcctaactgtaaaacttaagttttgactagtagttcgatgtaatccaacttcgaaaggtactttctcaaatacatgaagaacgttattttcatcaaaggtcaaagaggtattagaaactttggcaaagaaagtcttctgactttttttatttgttaataagaagagccagtcagattgtttctgacttccttcttgtaaggattcaatgatatgtttaaatggtatctttaaaataaaatcttcatcattgatacgtttaaattttgttaaaaaagtattctcagtgtcttggttatttatcatgtgaatttcagaaacatgatgatcaattaatgctagttgctcacttgctatagatatttttgcaatcagcgtttgattttgaatatagctctctttcaaagaaacaagtaaactctcttgtctgacatctaatatcaatccattgtttttctttttaaaacgacactgaaagagctgatcagcagtcttaaatgaatgtgtagtaatcaatttttgtttgtcttttataaacgatcctagtaacttgccttctatttcttcgtaaaaatgcatttgccagataccctcatataaattatgaaggccaattgagcttaagtctacgtgagcagaccaaaaaccatcttctgaaattgatttaacaggaaataatattttatcctttgaaggtactctatgaagagcaataatgaattttctttggtctaatggagcatcaatgtctaaaatgtttgaaacaccatttatggttagagtataatcttcaagcatgaaatcaatcatatttgttttgtataaatttgttctttttctagcgtttaaaacttcaaaagttatttttgtttgtaaattttcattgcttgttcttttgattaatacagccaattctctatgcagtatcttcctttgccatttgtgatgaacagcatattgtagtggagtgagtattccaccttgatctgttacgaagatactgaaagaagaaccttttagaggaagaatatctttagcacgtatttctgctacgtaaaaaccatctttattctgctgtagtggaaaatcaaatgattgattatcacgaatgaacttgattgtttctaggtcttttttatcatatgaatgtataaacaaagataagatagagttactagttaaaatactttctaaagaaaccatagtctctctccttaaaatctagttaataatctattttgaattagtaaaaataatacggaataactataatatggatatccaattaatatgttctgattatatagtcaagatagtttaacatacattattctgaaatgtaaatatcatcccaaatttgcctatatcatatggtcgagcaaataattcctatacttatgaatgatagcatctttgttttgactttaaagtgaaaaaataaacaacatctgttacaattatgagcggtgcttttatttttaatggcacttaaaacttttgttaaggaagataacaatgaacgcaatgttgacgatactaaaggagcaaatcagctcatttccgctgattatgcgacttgctgtttatgaaacaaaatcaaaatatcagatgaattatttaggtgttttatggcagtttttaaatccattgattcaaatgctggcttattggtttgtttttggtcttggaatccgcggaggacagccgattgtcattggaggaatggaagttccatttatcatttggatgcttgcgggattaatcccttggttcttcattagtccgacgattcttgatggttcaaatagtgtgtttaaacgcattaatatggtatcgaaaatgaactttccgattagtgcgctgccgtctgtagtgattatgtccaatttattcagctactttgtcatgatgggggtctatctaattgtgctgatttcctatggcatatatcctgatgcgcactggctacaatatatatactattttatttgtatgatcgcgtttatgttttcgtttagcttgtttaattccacgattagcgtactcgtgagggactatcaatttcttttacaatcagtgacacgtttacttttctttttgctgccgattttttggaatatctcagagaagctcactggagacaaagcatggatcggggatatactaaaattgaatcctcttttctatattattgatggttttagaaatagcttgttaaagggagattggtttttccatgatgtaaagtatacactttatttttggctgatcacgcttcttcttttaacagtcggttcattgcttcatatgaaatttagggataaatttgtcgattttctttaaaaagtaaggagattatacgatgaaactaaaggtttcgtttcgaaacgtatccaagcaatacgtcttatataaaaagcagtcggataagatcaaagggctgtttttacctaataaaaatgaaaaagggttctttgctgttcgtgatgtgtcctttgatgtatatgaaggcgagaccattggttttgtagggatcaacggatctggaaaatcaacgatgtcgaatcttcttgcgaaaatcattccaccaacaagtggtgaaattgatatggatggacagccatcattgattgccattgcagcagggctgaacaaccaattaagcgggaaagacaacgttcgcctcaagtgcttaatgatggggctgacgaataaagagatagacgagctttatgaaaaaatcgtagagtttgcggatatcggtgactttattgatcaacccgtgaagagctactcaagtggaatgaaatcacgtcttggcttcgctatttcagcgcatatcgatccagatatcttgattattgatgaagcgttgtctgttggtgaccaaaccttctatcaaaaatgcgtggatcgtatcacagaattcaaagaacaagggaagacaatcttttttgtcagccattcgattagtcaaattcaaaaaatctgtgatcgggtggcttggatgcattatggtgagcttcgtatgtttgatgatacgaagaaagttgtaaaagagtataaggagtttgttgactggtttaacaagctttccaaaaaagagaaacaaaaataccaaatggaacacaaggaaggtagaaaaggcgtacaaaagacggaaaaagtcacccgttataaagaaagtgggaaacgacgttcattttttggaccagcctttcaagtaacgatgattgctgttcttaccatattacttgccttatcgatgttttcggatcgcccgcttcgtacactggcgacgtttggcgccatcccatcagataagacagaatcgcctcagtcaaagaacccgctatcgaaaggggcgcctgatatgaaaaaggtggatcgacaggcaattgtcacggcagatccactcacggtgtacaaagatcaagccatgaaaaagaaggcagatgtcactttgccatttgggcaagaagtacaagctgtcgctgaaaataaacaaaccgttcaaatcaaaacagcatcagagacgtattttgtcaaagctgatgggcttcaacatgcagaagaattaaagtcattatccattggaccaggtcagttcaattcctatgtatcgcccgcatctgcaggctcgtatgagtatttactttctttccttggaaaagaagaatctgtgcttaagcaaagaatgcaaacgctgagctcgatcaaaagtaatcaaggcggaatgattgaacgattgaccacagagaaagccgactatgtcattcaaaatggtcaagcgaatacgatggtattccgtgagatcatgtcaatctctccttcaacacttgggctgacagaacagaacgtttggatgaatgagaaacaaacgaaattcgcagtgaagggcgaaaacaacttgtttgtcattgataatgaacagcatacactgacgatttcagtgatcaaataaaaagctgccgatcccggcagctttttttaattcacttcttctttttcgagaagctgtttcataaatggaatgagtttcttttttagatcctcatcttgaagggcgaactctagagtcgtctcgatgaagccttgcttttcaccgacatcgtatcgttttccttcgaaatcataggcgaatacgcgctgaatgtcattcagcttttggatggcatctgtcagttgaatttctccgcctgcaccaatttcttgctgatcaaggtacataaagatctctggcgtgaaaatgtagcgtcctaagatggctaaattggatggtgctgtaccttgcggcggcttttcaacaaagtttttcacttggtagcggcgtccttcttgtgtaagaggatcaatgatcccgtagcgatgtgtatcgctgtctgccacctgctgaacaccgatcacagatgaaagagtcttttcgtattcatccatcagctggcgaagtccgggtgtttcggcttgaacaatatcatcacctaataaaacggcgaaaggttcatcaccgataaagttgcgtgcgcaccaaacggcgtgtccaagtcctttaggttccttttgacgtatgtaatgaatgtcagcaatgttagaggattttctcaccttttctaaaagctcgctctttcctttttcctccaggttgcgctctagctctggtgcaaaatcaaaatgatcctcaatggctctttttccttttccagtgacgataataatgtcttcaattcctgattcaacagcttcttcaataatatattgaatggttggtttatcaacgattggcagcatttctttaggcatagcttttgttgcagggaggaaacgtgtcccaagacctgcagctgggataatggctttacgtacttttttcaatgaactttgcaccttccttacatattgaaaaaatgatttgacttcatttttcatctttcataaagtgtaacttacaaatgatagaaatgacaaatgatttacgataaatgtatgatgatctgatacaacatctattgtaaagagtccgtgtaaatttttatgttgaaaagggtaaaggcgatgtaaagattgaaaattgaatgattaggattcgtttctattcttttgtataataaacatatgataaatgagaaggaaagaggcatcgactattgaaaacattacatgtaatgactgtattcgggacgagacctgaagcgatcaaaatggccccccttgtccttgaactaaaaaaacatccgcaaatcaaatcctctgtcactgtgactgctcagcatcggcaaatgcttgatcaagtgctgaaagcctttgacattcaaccggatcatgatttaaatattatgaaagaacgccagacattatctgaaatcacatcaaatgcactgttaaagctagatcaattattccaagaagaaaaacctgatattgtccttgtccatggggatactacaacaacctttgcaggaagcttggcagcattttatcaccaaatttcagtcggtcacgtcgaagctggattgagaacacacaataaatattcgcctttcccagaggaattgaaccgtcaaatgacaggcactattgccgatattcattttgcacctacagacgaagcgaagcagaatcttttaattgaaaataaaaaagaagagaccatttgtgtgacagggaatacagccattgacgccctgcaaacaacggttactgagcagtatcagcaccctattttagagaaaataggcacggataaaatgatcttgttaacggcccatcgtagagagaatctcggacagccgatgaaaaacatgtttagagccattaggcgtgttgtagaagagtttgaagatgttcaggtcgtttatcctgttcatttaaaccctgctgtacgtgatgcagctcagacagaatttagcggtctcgatcgggtacacttaattgaaccgcttgaagtcgttgatttccataactttgctgccgcttcacactttatcttaacggattctggcggtgtacaagaggaggcgccttctctagggaagccagtattagtgctgcgtgatacaacagaacgtccagaaggcgtgaaagccggcacgcttaagcttgcaggtacagatgaagagaccatttacaaaatggcaaaagagctgctagtagatcagaaagagtatgacaatatgtcgaaggcgtctaacccttatggtgacggacaagcctcgagacgaattgtcgaagagctcctccatcgatttggattaagtgaagaaaaacctgctccatttacatcataaaaaaagaagactacagtcatgtagtcttcttttttactgctccaaactttccttcaattccttcttcactttagccagactgttatcatcgagctgataataatagatgttattgatgcgtgcgcctgatcctttcagctcatgctgtttgacgcgctgtcttgcgtcacggtagtcattcatcatcgtccacatatcatcaaatgacatgttggtcttcatattgttttccacgactttgaacatatcgccgaacttcgtaatagatgaaatgtttgccccttttgcaatgatgccttcaatgacttggcgctgcctttgctgacgtccaaagtcaccctttggatcttgctttctcattcttgtgtaggcaagggcttgatcaccatttagattaatttctcctgtaccaaatgaatggccgtcatagctgaaagcaaatgtgctgttaactgtaatgccgccaagtgtatcgacaatatccttaaagctttccatattgactttcacaaagtaatcaacaggtacatcaagcaattcctctactgtatctgctgccatttgtgtgccgccgaatgcataggagtggttgattttatccattgtgccttttccgacaatttttgtatacgtatcacgcgggatactcaccatctcggtcgttttggtttttgggttaacggtcatgtatattaatgtatccgcacgaccgcggtcattctttctttcatcgacacccataactaaaatagaaatcggatctttcttatttaaatcgacatctttgtcacgcttatctgacttctttaaattctcctgaatgcctgccacggttgatgctgctgtattccaaagatgatatgcatatccgccagttgctaatacgaataagccaataatcgataaaacaatccaaagaaccttttttttctttcgttttctttcagctctcataatgtccctcaccttttctatgattcttccatgattataggtttacgaatcttgataaacaagttatttttttactctgaacctagatatagacgttgtaacaaaaaaaaggtttcaaaaaaccttaaatttaccttaaaatattaagttataagacgatacaaagacatgaggtgaaaaaaatgaagaaaatcgtcgttttaccgttcttaatactactacttggtatcgtgctcacagcatgtggaacggctgagcagtcctcgggagaaaacaagacaagcagttcaactcctcaggtgctggaagaaaaagctgaatttattggaatggctgatgcacatacagtcgaagtgaaaaaagtgaatacgaccttaagctatgaatttacggataattttaaagatgtgttaaatgaattcaaaccaggagacacagtagaaatctcttactttatcaatgacagtggtcaaaaggaaatccaagaaattaaaaaagttcaatagagagttggtgggatcattaaattgaaaaaattaagtctaacttttacaacgttcatcttactattgcttgtatttatgccaaatgatgctgcagcggcaagctcaacaatttctgttaaattatcaaactatgttgggaataaaaccaactttaacatatcatcatcaggcttatacaaagtaactggtacaaatgtatcttcaatcgctcgatatgatggtaagaaccgttatgaggtagccaatagtatcgcttcagcaggttggaaaaatccatctaccattgtcattgtaaatcgtgacgcgtttgcagatgctatttccgctacacctttagcttataagttgaatgcacctattttatatacgaatgccgaaaaattaacaaaaaccactgaaaagcaaattaaaaaaatgagtcctgataatattctcattatcggtggtacaacaagtgtttcttcagcaactgagaaaacattgaagaaatacggaaagatcaaaagaatcagtggtaaatcccgatacgccgtttcccaaaatatcgcaaaagagatggggaactatagtcaagctatagtggcaacaggaagcatttttactgacagtgcgtcagtaacaccatacgctgcaagaaacggctatcctattctgttaacgaagaaagacagtttaccaacttacaaacttccaaaaaatgttgtcattgttggtggagaaaagagtgttagtaaaaaagttgaatctcaaattaaaaaaacgtccacagtgaaaagaataggtggagcaaatagatatgaggtctcagcaaatattgtaactgaattaaacatgaatgctaataagctatacctagcaaatggttctatctttacagatgctattacattttcgcttttagcagccaagaataacagcccaatggtacttgtaaaagaaaatagtctaacatcacctgtgacatcaattgtcaaaaaacaggggacgtactcgtttcaattgtctggcggaataaaatccatttcagcaagtgtacaagcaaaattatcaaaagaattttatttgaagaataataaggattatcaattgaatgtttctaacgggaaaatttcaatcaaaggcatcaagacgtttggatcttcagtaagagttgttccagagaaatattcaactacaaatgtcattcgagttgctgggaaagcatacttggggaacatgaattttgctgtagaatcaggctatattcgaccaacaaatgaaaacatcccttttgaagattatcttaaaggggttgtacctaatgaaatgccagcaagctggcatgttgaggcattaaaagcacaggctgttgcagcacgtacatattctgtaaacagtatagggaaggttgtaccagatactacagcattccaagtctatggaggatataactggtatacaaactctacgaaagctgtagatgctacaaaaggcaaggtactaaaatataataataaactgatttctgcaacctattattctagtaatgggggctacactgaggctagtgaagaagtatggtcaagtgcatttccttacctggtcgcaaaaacagatacaaaagatccaaagaatgcttggacacttaaactatcaaaaaaacaattgagtacatcactaagtacgtcatcaccagcatcttggtggagtaagacaacagaaacaaatgcaagtcagttgaaaggcttgaagagctggattctaaaaaataaagaaacgtcagcttcagacatcaagatagctaatatttctagtgtaaccttttctggaaaaacaaaagggcagagagcaaaaacagcctctttgaaagtcagctatcacttaaaaaataaaacgggttcctatagtatgaataaatcagcgacacttagctttaaaatgactgaatttagatcaatacttggtgccactaatttaaaaagcacgtatgcttcggtgaagaacaacaccaatgatttcactatctcaggaaaaggatatggacatggagttgggatgagccaatatggagcgaaaatgagagctgaatcaggaagctcatactcaagtattttgtcattctattatccgggtgcaaaattaacaacaaattaaaacatcaaaggaggttataaacgtgcgctctatcataaaagttgtatttttaagtgtaataaccatgtgtttgtttcttccatctgcacttgctgacaattcagtcacaagaattgatggaaagaaccggtatgttgttgcggtgaatgcggcgaaaaaaggctgggcaacatcaagcacggctgttcttgtagggaaagatgcatatgcggatgcattaagtgcggttccttatgcataccaaaaaaatgcacctgttctttttacaaacagtagcagtttatctacagatacaaaaaaaggccttcaaggtctaaaaacaaagaatgtgactattctcggtggaacaaagagtgtctctagcaaggtgacaactcagctaaaatcaatgggtatctctgtgaaacgtattagtggtaagaaccgttatgacttagcagcaaatatcgccaaacaaatgaaaagctctagtacggctgttgtagcaaacggctttgcttatgcagatgcagttgcgattgcaccttatgctgcaaagcaaggctatccaatcttattaacaaatgataaaggtttacgttcggaaacttcatcggtgatgaaaagccgagggattaaaaagaccattgtcattggtggggagtctagtgtaaataaatcagcttatgctaagttgccttcacctggaagaattggcggagcaaatcgttatgaagtcgcagcaaatattgtaaagaaatacaatatgagtacaagtaatacgtatattagtaatggttttgcctatgcggatgccgcttcaggagctagtattgctgctaagcaaggtaaagcttttattttcacaaatgaaaaaacattaccgaaagcaactagacaaatcattggttcaaagaagatcacttcatttagtgttctaggtggtacatcaactgtgacgaatactgtgatttcccaattgaaaagtccagttgttgggaagaaagtgtttattgatcctggacatggaaaccaagattctggtgccactggatatggtcttcttgagaagaacgtgaaccttgatgtcgctaagcgtctcaatacaaaattaaatagttctggagcactgcccgttatgtcacgtacatcagatacatttgacagtcttcaaacgcgagtaagtaaaggtgcttctgcgaacgcagatatctttattagtatccatgcgaatgcaaatgacaacagcagcgcaaatggaacagaaacgtattatgacaaaacatatgcggcttcgaacagcttgaaacttgcgcaaaacatccagcctaaaatggttagtgcactaggtacaagagatcgtggtgtgaaaacagcaggtttctatgttattaagtattcaaagatgccgagtgtcttgcttgaaactggctttatcactagcccagttgattcaaatattttgaaatcggcgacatataaagatcgtttagcttcaggtatttcaagtggtgtgtcaggttattttaaataagaaaacataaacatgagggatgcctaagttgctcctcttaggctgctcgagaacgtctctcggcagcctttttgatcaatcgtacaagagcaagaatttattttaaagtagatgttttcatatggtatcaaatgtatgtactaatcatgatcttgctacaagagatcaacttgcttctggcattctcttattttgacacaagatgaactgacggatgagtgtcaagttaaaaatacatttcatttttggttatctttgttataattgaaacatagaaggtgaatggtttacgcatgaatcttcaagcgacagcaaatcgataaatcatgaagaggtgacgatcttgaaaaaattaatcacaatgccgtttctagtattgcttctaggtgtattacttacagcatgcggcacaacaaatcaatcaagcgacaacaataaggatgacagcaaaaaggaaacaaccgaagcggctgatcaaaagaaagaaaatgcttcagaggaaaaaacagaagatcagtcatctaatgaaaaagcagatgatcaaagcaaagaaacagctgctcaaaaagaagagcaagctggtcaatctgatgaagcggcaaaagacagctcaagtaaagaaatcacaaaagaagaacctgctaaggatcaatcaaaagctgattctaaaacaaagaaagaatcaacaacaaataagaaaaatgaagtcaccaaagaaggcacatatgtcggtttggctgatggacataccattgctgtgaacattgatggcaaagaagtagctattcagttcggaaatgcgttttctaaacaagtgaacagcttaaaagaagaatcaaaagtgaaagtaacctatacaaaagatgcaaacggaacccttcgattaaaaaccatcgaatccgtcaaagcaaaataaagaaagacccggagacccgcagaattgcgggtcttttttacgttgaaaagggcataacttgatataagtgcacattcttaacacagttttacaagacttaacagcgcatttacatttgcttaatgttgctctgataaactgactttcatagaacatctctttacacaacaactactttagatggtgaggtgcaggtcagtgagtgcagagaaagcgatgaatctttatagagaatatgaagtgagacgaaaccactcttttgccttaacagaacatatggttcgttatttatttgcaaaacgtttcatagatttaatgttctcgttcatcggattgatgttgagtacgccaatcattttgctgtttgctctcttgattaagctggaaacaccgggatcagccttttatatgcaggagagggtcgggaaagacggtgtttactttaaattatggaagctcagatcgatgagaaccgacgctgaaagcggaggagcgaaatgggcacaaaaaaatgacccgcgtatcaccaaagtgggagccttcattcgtaaaacaagaatcgatgaacttccgcaatttatcaacgtgttaaaaggagaaatgagtatcgtaggtccgcggccggaaagaccgatgtttaccgcagaatttaatcggacgattccaggttttacgaaaagattagcggtcaagccgggattgacaggtcttgctcaagtaaatggcggatatgaaatgagtccgagcgaaaaattaacgcacgacttacagtatattcaaaacttgacattttctctcgacacgaagattatggtaaaaacgttaaaagtcatcatgacgggtgacggagccagataagtaaagtagggaagagaaatggcaagtatgaaaaaacgcatgctaggcggggcaaaatggacaagcttgtccgcattcatcattacgattatccaaatcgcacagttcgcttttttagggaacgtgatgtcactgaaggagtttggactcgttggcatgatcacaactgtcacaatatttacgcagattttacttgatctagggattggggcagcgatcatccaaaaggaacaaacaacagaacgtcaattatctacattatattggatcaatttgctcactggaattgtcttattctgtttactcattctagtaagcccaatgattgccgccttttataaccggccggagctggagggtttgctcaaactattatccatcatgtttctgattgcaccaattggccagcaataccaatacatgatgcaaaaggacttagcctttaaaacattaagtaccattgaagccattgcaaccatgatatcgctgtttgttttactcgctttggccttcttcatcaatccgattattgcctatgtcatttctcaagtgctgctgcaatcaggaaaagggctaatgtatgccgcagcttattggaagaagtggcgcccagcacctgtttttgcattaggggaagtgaaagaatttttctcatttggagcattccagctcgcatccagactggtcaatcgagcaggatcgaacatagacatgattttaattggccgttttcttggagcagaagcattaggtatttacagcttggcgtatcaaattgtaacgatcccggtgctgaagattaacccaatcgtgacgagagtggctttccctgttttcgcaaaaagtcagcgtgatcactccatgctgcgagagggcttcctcagtatgacgaatatgctcgcattgattagttttccattattaatcggtcttgctgccgtatcagatagctttatagaagtagtgtttggagagaaatggctcgtagccgttccggttcttaacattttgtgcattgtcggccttttgcgtgtgctgatgaatccaaacggttcaatacttcttgccaaagggagagcggacttagccttttattgggatacggggatgctcatcgtgtatggatgcgccttatatgcaggtgtcagcacaggcagtctgctcacagtagcttgggtttactcaggtgtcagcctgctcaactttattgttggcagatggctcatggcgtatgtcattcagcttgatatgaaggtgtatttaaaatcacttggaaagcctgctgtcatgacgctgttgatggccgcctgtgcggttttcttgcatcaaggcatgaagctgacgtcagcggatattttacttcaattaggattgacgatttgtgtcagtgctgcattgtatggcttgctgctcatcaaaatgtatccgcaggtggcaggcagattattgagaagaggtcgttcgtcatgaaggtgctatggctgacaagtgtatatcctagtgaaaaacatccaagtgaaggtgtattccatgaaacgcaagtgcaagagctgctcaaacaaggaatacaagtgaccgtcgtatgtcccaatccggtaattccaccggttttgcggatgctgaaggcgtcctatcggcagaaaaaaaatctgcttgaacaggaagtgagaaacggagtgacagtatacaggccgccctatacagcgctccctggacagctgaaatgggcacagccgagtaaacgaatagcggcttctgttctaggcgccatgcagcgttttcagttgtcaccagattttatccatgcgcactttgcgatgccgtctggcggagcggcggctgtgattcagaaagaaacgcaaattccttatcttttgaccttacatggcagtgatgtgaacgtgtatccgggctatagcaaaggggcacatgcagcctttgaaacggcggtgaaacaggcatctgctgttctgacggtgagcgaggagcttgctaaaaagacaaatgacatgacaaaggtggaagcgcaatgtctcccgctcggtattccgcttcagtcattttctaaaacggaagaagatcaacaaggcatcaggaaaaagttaggcttaccccttcacgacaagctcgttgtcttcgtcgggcgattagtcaaagagaagggcttacttgaattagctgatgctgtcagcggcatggatggtgtgaaagcagtctttgttggaaaaggcccccttgtaaaggagctggaagaacgggctggagcatccattgtactcccaggacaggtgccgaatgagcaggtgaaagactacttaatggcagctgatctgtttgcacttccttcctatagtgaaggaatgcctaccgtcgtcctagaggcgcttgctttaaaagtacctgtcattgcgacacgagtcggtggtctcccatctttattttctagctatcaacacctgctcgttgatccgcgttcgacgaatcagttaaaagaggccattcacgcctatctttatgaaaacagatggaatgagcaagtgaagaacgatcttcatcaaatcgttcacacagaatattcatcagcaaataatgcgaaacagctcatacagcaatatgaaaaggtgcttaatcaatcaatatccatcgtttaaacaagatgaaatgtgcaaagaatgatagatagataaacagcttggaacggacaatatgcttttactgagaggatgaaaaatgttgaagaaaattgctgtgattggaacagggtatgtcgggttagtatcgggtacttgttttgctgatatcggaaatcgtgtcatctgctgtgacatcgatgaatcaaaaatcaacagcttaaaaagtggtgtcgttcccatttatgaaccgggtttaaaggaattgattgaaaagaatacggaggaaggaagactgttttttacaaccaatattcctgccgctatcagggaatcagagattatctatattgctgtagggacaccgatgacagcacagggggaagcagatttaacgttcgtgaaagccgtcgctcaaacaattggtgaatccttgaatggatacaaagtcattgtgaataaaagtacggttcccgtgggcacaggtcgtcttgttaaggccatagtagagaaagcttcacgaagtaaatacccctttgacgttgtgtcaaatccagaatttcttagagaaggctctgctattaaagatacgatgagtatggagcgagtggtcatagggtctacaagctctcatgcattggagatcattaaggagttacatgaaccatttcaaacagcagtggttgaaaccaatctagaaagtgcagagatgattaaatacgcagcaaatgcgatgcttgcaaccaaaatttcctttatcaatgatattgccaatatttgcgatcgggtgggcgcagatgttgaaaaagtatcagaaggcgttggcctagatagccgaattgggcagaagtttttaaaagctggagtcgggtttggaggttcctgcttcccaaaagataccaaggcgctattaaaaatagctgaaacagtaggctatcgttttaaactaattgaatcagttgtcgaaacaaatacacatcaacgagcgtatctcgtaaagaaattgatggatgtctatggtgaaataaaggggaaaacgatctctgtattaggattggcatttaaacctaatacaaatgatttaagatcctctcctgctcttgatattattccaatgctgcaagatctaggagcttatgtaaaagcgtatgacccaattgctcacttagaagcgaagaagatccttgggaaccaaacgatatttagtgacaatctatatcaaacaatagaacattcagatgcctgtttaatcttgactgaatgggaagaagtattaaaaatggatatggagaaagtcagaagactacttcaacgtccagttatcattgatggacgtaatatatttgaaccagaacaaatgagaaaaaacggttttatttatcattcgatcggtcgtcctcatgtacaggatgttaagatgttattagaagcttgattttaggaggaacttggatgaagaaagtattggttactggaggtagtggatttataggttcacatactgttgaaaaattaatagaaaagggatatgaagccatcgtgcttgataacttttcaacaggtaggaaggaaaatattgcacatttatctgttccatgtattgaagaggatgtaacaaaaccagaagtgattgaaatcattaaacaaatcgcaccagactacatcattcatcttgctgcacaagtaagtgtcgcagtatcggtcaatgattatatatatgatcaagaagtgaatattaaaggatctttgcatgtgatcaaagcggcttcagaggctggtgtcaagaaagtggtatttgcctcatcagcagctgtctatggagatccagtgtatctgccagtagacaccgctcaccggctaaagcctggttcgccttatgggttatcgaaactcacagtagagcgatacttagaaatggcaaaatcactgtatgatgtggactattgtattcttcggtacagcaatgtttatggtccgcgacaagacgcacttggcgagggtggagttgtctctattttctctgataagtttgcaaaagatgaggctcctttcattttcggagacggggaacaaacaagagatttcatttatgtaggtgatctagcagcagcgaatgttgcggctttaacagctcaatcaaacgtttgtttaaatatttcatgtggtgattcgatcactgtgaatgagctgtttcaaacgatgaagcgggtgacgaggtcgcatcttgaaccaatttacaagccgcagcgtgcaggagatattgtgcatagtacattggcaaatgaggaaacgaaacaagtcttagcatgggagcctgttgtgagtttacaggaaggtttggctcgtaccatttcctactatgaacaggaagtcaaggcttaatccctcaaatcggatgggttgcttaggaggaaaatgggtatgagtgtgaaacaaacagcatggcaaatcatgattggatgtattttgtttgcagcagggatcgggcttgtacaaatggcaaccgcccagcccgtcgggttaaagaagatggtggctgttccggttatacttttgatcctgtcggctgctctcgtgttgatgaagctatacatgaatggtgagcaaatcttcatgtcagccatctatcttttgattgcattgacttttctcaacaacgctttcttttctattagtgccggattctttagtctttttctctaccgtattatgcttatcgccgtctttgctttattcatatggcggatgagagataaggggacgtacatatcgcagtggcagcagattcgtgtcaaaggaattcttggttttttcgctgcatggtttctttacgggctcatctcactgctttgggctcattcggtcacagacggcctgaaatatatgtccctgcttgcaatggggatggggtttgtctttcttgtcgtcatgttcattcagcgaatggatcaagtggtgaccttttatagcatttggctggtcatgactgtgtttgtgatggggattggtttctataatcactttacattgaaccatttaccgaatacctcattgtatctaggaccagcgtataaacagcactatcctacatctgtcttttttaatcaaaatgactttgcgacgtttttatcgattagtttctttttatatctagcgtgcatgcgtcaaatgaaaaacggttatatcaaagcgtttggattattaggggcaatcgccgcactgtatctcattttgttaaccgaatcccgagccagtctgcttggcatatttgcaggagtggcggtctatgtatggctgctgctgccgcgatttctcaaaaagtggtcaatcattgcagcaagcggacttgtagtcatcggtatcgctgtcttttcagccaagatttattcggttttttatgacttgtttctcgcttctcaggtcgcacattcttttagtgaaccactcccgtctaacatcgcgagagcgaatttgatcaaaaatgcttggcacttctttacgaattcatacggattcggggttggagcggggaatgtgtcttactacttagctcacttttcgatctttgatacagaccaggtcgtagaagtgcacaattggctgctggaattgatgacgaactttgggtttgcagtcatgctgggctatatctcagtatacgcctatctcatgttcacactgtacaaacaataccaatgggctgacacaagatcggcaaaaatgatcattgaggggttgtttgcagccatgctgagctttctcgtttcaagtatcagtcctagctccgtctcgaatttatatttccactgggtatttttaggactggtgatcgcagcggtgaatatgttgaaaaataaacaacgactcaagctatggtaaaccgtgtgtatggctacactagtgaaagagcaaatacgtcaatgttgggagaatgaacatgtctggtttcatatctaggatagggaagcgaatcaaaaagtacatcgtatggctcatcctgctgcctgtcatattaggcgcctttggtttcttttttgctaaaggaactacgcagcagtccagttacacagctgctgttaccctcactcttggtaaatatgatgatggggtgtataacaatatggcagaagtgacatctctattaaaaagcgatgcatttctaaatgaagcactcagtgatgtcaaagaagaagaaaggcaggatgtgaaaacccgtctcatccttaccaatcaatcagatacacaattacagctgtctttcacagatgccaataaggatcgcgctttggctgtcgtgaagcaggtgtcggatacatttcttaagcaagacaaagcattatttacaaaaaggcagcaggtgattgaaagtagattagctgctcttgaagacgaatctgtcagcaatgattccaaagtcgataaagaacgattcttatatgaattggagtcgacaaagcttggaatgaagcaggcaaagattgtcgatcctgcacaagtacttgatgagggcaataaaggcatgtcagccaaaaaacgtgcactgcttgggcttgtcattggctttagcatctcgctcatgtttgtggtcttacccgaagtgttcaaagaatcttaatgatgaactggagatgagtcttaggtgaacaatcaaccgttagtatccatcattacaccggcgtataatgcggaacgttatttaacggatacagttcattccgtccttgcccaaacctattccaattgggagctgatcattgcagatgattgttctacagatggaacgagaaagctattaggggatttaagtcaagcggacgacagaatcaacgtcatttatttagaggaaaatgggggagctgccattgctagaaacgcagccatcaaccaggcaaaagggcgctttattgcttttttagatagcgatgataagtggaaagagacgaagcttgaaaaacaggtagacttcatgctgacaaatgattatgcctttacatttacggcatatgacatcattgcagaaaatggagaaccgttagaaaaaaccgtcactgcgccagcgagattagattataatgaagccttgaaaaataccattatcggctgtttaacggtcatgcttgatcttcaaaaggtaggacatgtggaaatgccgaacattcgcacaaggcaggatttagctacatggctgtctatattaaaaagaggatttacagcctatggtatgagcgaaccgctcagtgaatatcgcatcgttggaaactccatctctagcaacaagtggaaagcagcgaaaaaaacgtggtttgtctacagagaaattgagcagcttcattttgtcaaagcgtcctggtgttttatgcactatgcgacaaatgctgtgaagaagcgcttataaacagaagggaaaaaaggtgataaaggtgaaagcagactcgatcatacatgttgtcgtagcgacgggagaatggggacaggacggactgaggtacagacggcatcggttggccgaatttttagcatctgatccggaaacgaaagaggtcatctgggtatgcccgtcatcatctcgtcatacagctccctttcagcccataacagatcgaatgaagcaattggccattcctgatgtgctcaagagtaaattatttcgctttggccgatatcaagacatgttctatattcataaattgtcccctcttcttgagcatttgcggatggaggaaaagaaggggattgctgtttgtttatggtatacgtttccgggctttccgctcttatcttccttatttgaatggaaacacattgtctatgattgcagtgacctgtggggagagccgataagcggcaaacacaacattctttcttatatgaggcagcgtgtcattgtcaaagcagaaaatcgaatcattaaatacgcacacagcattacatgctcttctcaatatttacacgatcaaatcaaaaaacgtcttatgggagaaccgaaagatgtgtttactgtggaaaatggcgtcgagtacgatgtatttgcgaaaagcaatcttccgtgtaaagaagatgtgctggaaggaagagaaggaaccgtgcttggttttatcggaggaatcaagccaaagctcgattttgacatgatggctgaagctgctcgcatgcggcctgattggacatttttatttgtcggtccggatggaacgaatggagatccatcttttcagcatgcactcaaactgccaaatgtgatttggacaggagctgttgcaccagaagaagtacctgcttatatgaagctgattgatgtaggcatgatgccatacaaacaatccccttacaatcaagcggtgttccctctcaagctttatgaatttttagcagctggaataccggttgtcggtttaaatctcccgtcaacggaaaggctaaaagagaaggatgtgtatgaatatttagagggcgatgatcctgcgctcttcgtagaagcctgcctgaaagtgatcagcaaaaaagacgacacgacctatagacatctaagacaaagccgtgcaatgaaaaaagattggcacgcgctgttcacaaacatggtggaactaacgaatattaaagaaaacgcataattcattcgggattgtgcgtttttatttgtttcttcttcaccgggggagcttgtgatcatcctctattcaattgtataatggaaagagcggccaatatacaaaatacagatttcaatttagaaggagactgacctatggattacgaacgcgccttattagcgttttttgtctctctggctacagttttaattgtgacaccaatcgtcaaaaagtttgcaattaagattggtgcagtggaccagccgaataaacgaaaagttcatgataaagtaatgcctcgaatgggtggtttggcaatttttattggggtagcggctggagcattagcaggcgggctgtttctacataataaaattacagcaatttcagttggtgccgtactcatcgtcattttaggtatatttgatgataaatataatttaagtgcaaaatttaaatttctcgtacaagttcttgttgcttgtttgattgtgagcacaggcttaaaaatggattttttctctgttccttttttaacagatcgaattgagttaggctggatggcatatcccctcaccgtgctatggattgtcggcatcacaaatgccattaatttaattgacggtcttgatggactagctgccggtatttccgtcatcggtttatcaacgattgcagtgatggcattttctgctgataagattctgattctttctttatctcttgtcgtcattggcagtacgatcggctttctcttttacaactttcatccagcgaagatttttatgggggataccggttcgctatttttagggtatatgatctcggtgctgtcacttttagggttatacaaaagtgtcactttgtttagcgtcgttgtccctgtgatcattctaggtgttcctatatttgatacgacctttgcaatcattagacgcatattaaacaaacagccgatttcagcgccggacaaatcccatattcatcatagactaatggcctttggcttgtcccatcgcatggcggttatcgtgatttacatgattggcttagtctttagcttaagtgcgattttgctgacaagcgccaccatttggttatcgctcatcattatctttttactggtaatgtttatgcaagtgattgcggaagtcacgggtttggtcaacgaagagttcaaaccatttacgaaattctataaacgaatggtgaaaagacaataaaaaacagcccgttcctaggaactgggctgtttttattattgtcctggtgtgctggtcgaaggattagttgtatcacttgaccctgtttcaccagagggtggattggtttgtgaatctgtttcactcgaggattcagcaggaagctttaaatgcgtccgtaattcattttgtacgttagctagattggtttgatctggctcaaagtaatacgttcgatttggtcctaaataaaggtctgttcctttaatagaaagtgtttctgtgtcgtttcctttaaatccgctgtagatttgctgaagcgcaagaccttctgtgatacggaagttggttgtaatgtgatcacttacttctttagcgatattatcgacgttcgcaatgttatttgccttcgacatttgatcaatcattgcgcgtaaaatttgtttctgacgatcattacgtccgaaatcaccgcgtggatcttgttttctcatccgcgcgtaagcaagtgcttcttccccgtttaaatgcatattgccttttttgaagtaaatctttttcgattttttcacatcacttttttcattgaagtcaaatggaacatcgatatcaattccgccgacttcatcaataacatccttgaatccgtcaaaatcaacggttgcatatttatcaatcggaatatgcaagaattgttcgacagtttcaatcgtctcgtcttttccacctttagcaaatgctgcattgatcttttctttatttcctgtcgtgtcacttgcaagctgtacgcgtgtgtcacgagggatactaaccattttcatcgttttgtcttgagggttaatcgttgcgacaatgagtgaatctgaacggccatgatcaccatctgtggcataatcctcaattccgacaaatagtacagagaaaggtttcttcttaatatcaatgaccgcatcacgaagcttcgatttctctcctcggtctagctcatcatatgttttgtcagcagcctgaagtgtattgactattttatatactgcaaatccgcccatgcagatgataagaagtaaaaataagaccaggatacgtttgaaaattttcttcttcttactctttttctttcgtacacgcactcttactcgttgtgccattcatctgtctcctttatcggaccaatgtccttttctaaataaatcagttcgccttcttttgtaacactctttccatttgtcagctcagtcatccattcaatgaactgctctgtttgtgtttcttctacatacgtctcaaaaataacatcttctgcataatgaatttcttttagctgaaaagatgaggctctaagctcattctctacctttccaagccatgtataatctattgttgtgtgcatcgtacgcattaaacagcgttctaccataccaacatggttgatggcttctgatacagattttccgtaggcacgaatcaatccaccggcgcctagcttaataccgccgaaataacgagtgaccactacgactgtatctttcagcttccgtttttttaacacttcaagcattggcacacctgctgtaccgcttggttcaccatcatcattcgctttttgaatcaggtcatgttctccaatgagataggcagaacaattatgtgtggcattccaatgttgttttttaatggattgtataaatgcttgtgcttcttcttctgagacagcacgctgtatatgacaaataaaacgtgatttttcaatgacgatctcatgctcgccacgactttttactgtaagatagcgattcagcaaaagacttaccctcctgacaagcaaattgtaagactagagaaaatttgcattgattttagaattttacagcgtattttgttatgatgataggggcggaaaaagggtcgtcataaaaacttcatgatttatacgcattctttcattataattcgacataaaatgcagatcaatgacatttataataaaaaaagatgacatcactgttacgggagggaaaagccatgacaacacctaaaatggatccgaaattattggattcaatcatcatgaaaatgctaagtacagttgatggcagcaaggacgaagtatttaggataggcgaacagtcccgtcaacaatatgaaagcctagtagaagagctgaagcaaatcaagcagcaagtaaacgaagtaattgattttggggataaactcgaagtccatacgagacatgctagaaatcgcttatctgaggtcagcagaaacttcaacaaatttagcgaagaagaaatacgggaggcctacgaaaaagcacataatctacaagtggaactcaccatgatccagcagcgcgaaaagcagctgagagaaagaagagacgatctggaaagacgattgttaagcctgcaagacgtcattgaacgctctgaaacgcttgtgagtcagatcacagttgttctcaactatctcaatcaggacttacgccaagttggcgtgttacttgaagatgctcaggcaaaacaagattttggactaagaattattgaagcccaagaagaagaacgcaaaagggtgtcccgggaaattcatgacggtccggcccagatgctggcaaacgtgatgatgcgttccgaattaattgaacggattttcagagaccgtgggacagaagaaggctttaaagaaattagaagtctcagacagaatgtgcgaaatgctctgtacgaagtgagaagaatcatttatgatttaagaccaatggctttagatgatttgggtctcattccgacgctaagaaaatatttaaacacaatcgaagagtatgatggaaaaaccaagattacgttccaatgcctaggggatacagaaagcgaaagaattgcttctcaatttgaagtggcactgtttagactagcccaagaagctgtcacaaattcactaaagcattccgaagctgaagaaatctctgtaaaagtagaagtgacgaaagactttgtcacgttaattatcaaagacgatggaaaaggctttgatatgaaagatgtgaaaacaaacaaaaacaaatccttcggtttacttggcatgaaagaacgcgtagacttactggaaggtaaaatgaccatagactcaaaaataggtctagggacattcatcatgattcgcgtgccattaacattgcaaaataaaattgtaaaatagagacaaaagacatattgaccataaagttcaggtgtagaacaataaacatggggaggcgtagcttgtgactaaagtaaatattgtaattattgatgatcaccaattattccgtgaaggtgtcaaacggattttagattttgaacctacttttgaagtagttgcagaaggagacgacggtgacgaagctgcacgtatcgtagaacactatcatccggatgttgtcattatggacattaatatgccgaatgtaaatggtgtagaggctacaaagcagctagttgagctttatcccgaatcaaaagtcattattctatctattcatgacgatgaaaactatgtgacacatgcattgaaaacaggggcaagaggctacctgttaaaagaaatggatgcagacacgctcattgaagcagtgaaagtcgtagctgacggaggatcttatttacatccgaaagttactcataacttagtaaatgaattccgacgcctagcgactagtggcgtttcagcacatccgcagcacgaggtatatcctgaaattcgcagaccacttcatatcttaacgagacgtgagtgcgaagttcttcaaatgttagctgacggaaagagcaatagaggaattggtgagtcgctctttattagtgagaaaacagtcaaaaaccacgtgagtaacattttacaaaaaatgaatgtaaacgaccgtacacaagctgttgttgtagcaattaaaaacggctgggtagaaatgagataatgttccggacaagtactcctttttcgcctgtttttggttctctcacatgttaattggagagaaatgataggtagataaggagtctttttcggatataacgggcttgcctattgattaggcaggcttttttgattactattataaatctaatgaataacaatgatcattctttgaaaataaaaaagagcaacttaacggataaggaaggtatttaagaatgaaaatagccgttgtaacagacagtactgcttatataccacaagaactgcgtgataaacatcatattcatatgatccctcttaatgtcatttttggcaacgaatcataccgtgaagaaatagaaatggattggaagacatattatgaagaagtcaaaaagcataaagaccttccaaccacctctcagcctgctttcggtgagttaatagaattatatgaaaaactaagtgaaacatacgatgccgtgattagtattcacctttcaagcggaattagtggaacatataatagtgcagcctcagcaaatgacctagttgacgggattgatatttatccgtttgatacagaaactagctgtatggcgcaaggtttttatgcgatagaagctgctgaaaaaatccaaggtggtgcttctctagaagaagtgttagcccatctcaattatctgaaagagaatcagagagcttattttatggtagacgatttaactcatttacaaagaggcggcagattaaatggtgctcaggcttttattgggagcctcttaaaggtaaagcctatactgcattttgacaacaagctaattgtcccttttgagaagattcgtacacggaaaaaagccatttcacgtatttttgaattatttgacgaagatgcatcacgtggtgtcccgatgagagcaacactgatacatggtaatagagaagaagaagcagacgacttaattgcgcacttatcagaaaagtatcctcatgttgaattttataaaagctactttggtgccgtgattggcactcatctaggcgaaggctctatagctcttggctgggtgattagataaatcttaaaaaacctcttttctaatagaaaaggggttttgtttttctattttagctgttggacgaaaggtcatgtctttgcgcataataggcaaacatcagttgaaaggtgtttggtgaaattgaacatggacaaagcaatggaactaaggcagcaactgcagtcacgccacctgcttaccgctgaaacaagatgctcacagtccgatttggattggctggtggagaaagggttagtcatccgaacacctgctattgagaggaaagcaaatggtcttacttgctgtagatgtggtgtatcaaaaaagcggtactttgcccacactccgtgtgacatgtgtcaaaaagattgtgtgtactgtagatcatgcatcatgatggggaaaacaacggaatgtggctttctttatgaatggacgggtccacaaatggaagaaacatgtcatacggaattaacatggcagggaaacctgtctaaaggacaaaaaagggcgtcagaaaaattgatcgaagcgataaaaaacaaatttgatctactcatttgggcagtttgcggggcagggaaaacagaggtgctttttcacggaattgaatatgccttacatcaaggaatgagcgtctgcattgcgacacctagaacagatgttgtccttgaactagagccgcggcttaaaaaagcatttcaaggaatgaaaatagctgttctttatggaggaagtcctcaaaggttccaaatagcaccgctagtgatcgccacaactcatcagttgatgagatacaaacttgcatttgatgtgcttattatagatgaagtcgacgcctttccttattcaatcgatgaacgtctccaatttgctgttttaaaggcaatgagaaagaaaggggttagggtttatttaagtgcgacgccctctaagaaaatgaaaagagatgtatctcgtggacaactagaagccataaaaattcctctgcgctttcaccaacaaccgttacctgtcccgtcctttcaatggattggacattggaagaagaaattaaaaaagaaccagctcccacctaaagtaatgaattggatgcagaaacatatcacaaagaagagaaggattttactttttgttccttctatttcgaccatgaagaagataacgaaggtccttagagaacaccgcttaaatgtggagggggtgtctgctgatgatccagacaggaaacaaaaggtccagcacttcagagattataaatacgatgtactagttacaaccaccattctagaaagaggcgttaccattccaaatgttcaagtgggggtactaggtgcggaatctactatctttacagagagtgcacttgttcagatttctggtagagcaggtagacatcccgatttttttaaaggagatgttatcttttttcattttggtttaacgagaagtatgaaacaagcaaagaagcatatcgtaaaaatgaatgatacagctgcaaaagagttttctgaaaaataatgtgggtccaactaaatttcatggtacatttatattcacaatacacaaatggcaggagagacaaatatgctactcaatgcaaaagaaatactactcaaggaaatcctctatcaatatctcaaccaattaaacatgatttgtcactgtgaaaagtgtatagaagatgtattagcgatttcactaaatcaagtgaagcctcagtatataacagatatcgataaaatatcttacagtaaatccgagatggtggataaacagaagaatacggccatgctggtcattctgacagaagctgcttcaaaggtcaccacatttccaagatgcgaaaatcgtctgccgataaataaggataacaattgatctgcctaatttgtgaggggcattttgtcgctgcttttacatggaaatcattacttctattaaatgatgatcatctatgtatagcatgtaagcatcacctagaaaaaattcaacgcccgatttgtccagcttgtgggagagcacagtcgaatgatcaattatgtcaagactgttccaggtggaaagaacgccctgattctactacagtacttgtgaaaaataggtctgtttatgcttacaacgatttgatgaaagatgtcctttcccgctttaaatttcgaggtgatacagctttagctgagctttttaaacaagatgtccaagcagtatttaagcgctccttttcaattaaagaacctgtgctgatcccgattcctttaagtaaagaaaggctaaaggaaagagggtttaatcagtcagtcatacttgcttccttgattggtcagccgatcctgcagccgcttgtgaaaatacatcaaagcaagcagtctaagaaaaagaaaaatgaacgtttagatcaaaaaagaatgtttcaaatcaagcagacagatgcgatcgttcaaagggatgttatcttaattgacgacatctatacaacgggggccaccatttatgatgcggcaagaattttaaaagaagcaggtgccaaaagtgtttcctcttttacgttgatccgtagttaaaattcaggataattaaccgataataagaagagaaaataacgtaaggggttttggttatgaatcaattggcaaactgtccacaatgtaatcagctatttttaaaaaccaccatccaaacggtttgtaacaaatgcttcgaagaagaagaacgttcttttgatatcgtttataaattcttgcgaaagcaaagtaatagacaatcaaccattgctgaaatagtagatgcaacagaagttgctgaagaattaatcttgaaatttatccgtttgaaaagacttcaaattagtcaatttccgaatatcaactatccttgtgaaagatgtggccaaccgatcagaaaaaacaagctgtgcagccaatgtgaacaggatattcattcgcaaatgagtcaaatgaatcaagaagaagagcgtaaaagggagattgaatctaggaaaaaagacacctattatgccattaatcctaaaaacgattgattccctaaactaagttgcagtttggtcgataaaatggatagaatcaagacagactgtaacggaaagcgagaggaatcccgtgaaaattaatcgatatggaacacaaccagtaaatccttacaagaaaacatatgagaaacaaacgttgcaatcaaatcaagcaaaatcaactgataaagtcgaaatttctaaaaaggcaatcgaaatgcaaaaggtgccgaatatcatgaaagaacgccaagataaaatagaccaaattaaaaaaagcattgaagccggaacatatcaagtagatacaaaaggcattgctgataaaatgctgaatttttataaacaacaataacaaaagggagtagcgtgaatgtcagttaaaataatcattgaagagctgcatcgtctctatggattgcatgaacagcttttgaagctgtcgaaggataaaacagaaatgctgaaaagcaatgagattgatgctctttcagaggttctgaatttagagcaaaaatatattcaagccatttctcaactagaagaaaaacgaattgaagccacagttcaatttttacaaagtgatgaaccgccaaccatcaccgcgtgtatcgaaaaggctgaaggttcggatcaagaagagctcatttcgttatatgacaaattaaatgacatcatggtggaactgaaagatgtaaatgaactgaacaaacagctcattcagcagtcgcttcaatttatttcactgacattcgatctcgttaaccctaataaagaaaatatgaattacggacaaaatggtcttgagagttcaaagcctaaacagcagagggctttgtttgattcaaaggcgtaaacaaggaggataccaatgggttctacattcatgggtctagaaacggcaaaaagaggaatcacagcccagcgtgcagggctttatgtcacatcaaacaacgtgtccaatgcaaatacggatggctactcaagacaaagagttacctttaaagcagataatccttatccagtcatttctgtttatgacggcaagacgtatggccaaatggggacaggtgttcaagttggaaccgtggaaagaattcgagacagctttttagatctgcaattcagagatcataacaataacttgtcttactactcaacaaaatctgatgccctttcgcaaatggagggggttatgaatgatttgacggatgaaggcttaaacagagcttttgataacctttggaaatcactacaggtcctatccgaaacaaaaaatgccgatacagcttctgcgcgtacagttgttaaaacaagtgcacaggctttagtagatcaattccgtttacttaattcttctttaacaacgatacaaaagaatttaaaaacagaactcgattcaacagctaaaaatgtgaacacgattttatctcaaatagatgaagtgaataaacagattgcagcagttgagccaaacggatatcttccaaatgatctttatgatacgcgtgatgctttggtagatcaattatcctcacttgttgatattaaagtgagctacaatccatctggcggtaatgcactcaaaattgctgaaggaactgtcaacatcgacattatcggtgcaaatggacaatctgctggaacgattttgaatggcattacgaacgaaaaatctgaactgcaaatctcctatgataatacaacgggacttgttaactcacttcaattcggaacaacaaccattgcagcagatcagcttcaagtgaatggtaaagtaaaagcacttgttgaggcttatggctacatgtcaaatggtgctgaaaaaggcatgtatccggatatgcttgcagagctggatgaagtagcacaagtatttatggatacatttaacgatgtgcataagcaggggtacacgttaaatggcacaagtggacaagacttctttgatattgagaataacaatgaattgaataaaggcttagcagctcgtatcaaagtgagtgatgtcattttagcatcaacagataatattgcagcatctctcaatcaaacaaaaggtgacggttcgaatgctacaaaattagcaaatatacaagacttaaagttaccaatcggcggcaatacaacgacgatccaggattactaccaaaatgtcattgctgagatggggattcaagggaaaaagaacatgacgctagaaagcagttcagccgctcttgtcaattcagccaatgaacgtagaatgtcgacgagtgctgtttccattgatgaagaaatgacgaatatgatccaatttcagcatgcatataatgcagctgcgagagttgtgacattacaagatgaaatattggataaagtaataaacggcatgggtgtcgtaggaaggtaggtatagctgatgcgagtcacacaaggtatgatttctcaaaactcacttcgtaatattagtaaaagttatgaaaaactttctaaaataaatgagcaagcacaaacagggagacgtttcacaaaaacgtctgatgatcccgttgcagcagtaaaaagccttcaatatagcacagcaatgtttcgaaatgaacaatatcaaaaaaacttaaatgaagcacaaaactggattgatacatctgaaacaagtgtcactgaaatcattgatattatgtcaaatgtacgagataaagtgcttgatgcggctaacggaacaaagcagccagaagatttagcagctatcggagtggaaattggccagatgaagaaacaaatcattgacgcaatgaacactcagatgttaggtaaattcgtatttaatggaacgaatacaaatgtcaaaccagttgtcgagaacgcagatggtacgtttacgtttaactttgaaaactatacagatgcaaatgccgttaagtcgaacatttctgatggtatcactttaaatgtgaactcaaatccaatttcagcgtttggtggacagtctgccagcggtcaaaatgtcattgaaatgctgacggatttagaaaactcattgaaaaatgggacgttcgcaaattctgatgatgcgttaggaagtatcgatcagtttaaagaagtgatgagtgctgagcgctcggacctaggagcccgttcaaatcgtgttgacttagtaggcagtcgcttgacttcacaattcgaagtactgaaaaatgccaaatcagataatgaagatgtagaaagtgaaaaagcaattattgatcttcttcaacaagaggttgtgaatagagctgctttagcaacgacggctaaagttattcagccatcccttgtcgatttcttaagataataaaaagcatccgttgggtgcttttttgcatcatggaggtgtacctatatgcaaatccctagattgttaatgcaacaaacctatgcaaagctgcaaatgtcgacaactccttctcggcaagaagtagagcagccaagagcagaccttgagattcagcagcccagagccgtcatgaatatgacaaggacaccgtcaaaattaacaatagatcaaaccgaagcatttgccgatatggatatcaagtcgatttttagacgatctgaggaatgggcagctgaggggaaacgtgctgttggagagggaatgggccgaagagcggaagaaggcagtgaactcatcaagatcgagaatggtgggaatgcaattgccgagtttgccaaaatcaatggcacccctccagccaaacaattcaccattggtgtgatcccttcattctttagtgtcaaaattcactatcagccatctgagcttcaaattgatgtggagcctcaaaaagctattatagaggcaacgcctcataaaccaatcgttaactaccagccaggtaaggtcaatattgatatgttacaatacccagatttaaaaatagaagttgacgaaacgggccaaaatggtgataaggtatagttaagaaaaatgaaaaaggtcgtgaattatgatcattcaaacaaaataccatggtgaaatgacaatcaaagaggagcaaatcatcaacttctctaatggaataccaggatttctagatcaacaacagtttgtcattttacctttatcagaagagtctccatttttagttcttcaatcattgaaaaacgcagagttaggctttattgtcagcagtccgtttttattcttcaatcaatatgaattcgatctagacgaaacggtcgtagatattctagaagtagaagatgccaatgatgtggaagtcatggtgatcttaacaatggaatcttctattgaaaaaacgacagccaatttaagagcgcctattattgtgaaccggaaaaacatgaaagccaagcaggtgattttgcatgattcagcctatcatacaaaacatttgttagaggtggcatcctcatgttagttctctcgcgtaaattaaaccagtcgattcaaattggcgatgatattgaagtcaagattatttcaatcgaaggcgatcaagtgaaaatcgggattgaggctcctaagcacattgatattcatagaaaagaagtgtacctgtctattcaagaagagaacagtcgtgctgcgagtttatctgtagatctcctctctcaattatcctcacaaaaaaagtgaggatttttttatctgattcagctatccttctccacgtttctgtgtggatgttcaccatctatatgaaactttaacaaatcggtccatctatatttaatttgaaaattcaaagccgatataaaagatagattaaagcacaggagctgaataactatgtctgttggtaagttgacatcgctagagccaattatcgatgcatttcaaacccgtgtttctaataaccagaatgacaatgtaaactctgatttacaagcaaatggcaaggtcgtttcaaaagaagaaattgaaaaaacgcttcaaggagcaaacaagctgattgaacccactcaatttcatctgcaatttgaattacatgaaaaactcaatgaatattatgtcaaagtcgtagataaccaaacagaagaagtcattagagaaattccttccaaggaatggcttgatttctatgcggcaatgacagaaattgtcggtttatttgtagataaaagaatgtaagtgaagggagaacataaaaaatggtcaatcgaattactggattttcaaatgtgtttgatattgatgaaatcgtatcaaagctaatgaaaactgagcaagcaccacttgataaaatgacacgccagaaacaaacacttgaatggcaaagagacagctatcgcgaggtgaactcgaaagtcaaagaattagatgatttgatcaacagtttaaacttaacgcgtccaagtacatatggcgcaaaaaaggtgacaagctcaaatgaatctgctgtcacagcaactggatcaacaaatgctgcctctggctcaatcaatgtcacccaattagcgacagcttccgtcttcagatcatctggtacatctggatttacaccaacaaatggcacgtttacattcgaagtgacgacaccagattcgacaaaaccgaaaacggtgacgatcaatacttctgataccgatacaattgatgacatcgtgaaaaagctgaacaactcgcaattaggtgtgacggcttacaaaggacagatctttgacggatcaaactatgtcgatacggtcgctctcacttcacggacaacgggagaaggtgtcagtattaaagcagctgatggtaattcagcttcattcttcactcaattaggcttccaagtggatggagataacaaattagttgcgaccactcaagggcaaaaagcacaatacgagattaatggtctgaaaatggaaaataacaacaatacatttgagcaagctggtattacgtacgagcttaaagggacaaccgataagcctgtcagcttaaacgtttcaacagatgtcgatacaatctttgataaaattaaacaatttgttgataaatacaatgaacttgttgagcaggtcaatggcaaagtcaatgaaaaaagaaatagggactatcatcctttaacagctgaagagaaaaaagcaatgtctgacaaagaagtggagctatgggaaacgacagcgaagtctggcttgctgagaagtgattccattttacgaggtggtgcctctaaaataagaagtgatttttatgctgatattacgacaagtgatgggaatagaattcacatgacacaaatcggaattaccacttcagataaatataaagatggcggaaagcttgtcattgatgaaccgaaactaagaaaagccattgaagaagacccacagaagatcagtcaaatatttatgtcaggttcgctaaatgtggattcaaaagataaagataaagcgcagcagcaatatcaagaacaaggaatcattcatcgtatcaaaaattccttatcagccttcacgaagagcattcaaactaaagctggcagcacaacaatgcaattaaaggaatacggacttggtaaggaccttgattctttaacaaaacgaatggatacattccaagatcgtttaaaaatggttgaaacccgctactacaaaaagtttaacgccatggatagcgcgattcaaaagctaaacaaccaatctggctatctttctcaactgcttggacaataattggaggtttataacatatggcaatacagaacccttatgccgcctatcagaaaaattctattgagactgcaacacctgccgagttgacgcttatgctttatgaaggctgcttaaagttcattagactagcgaagtatgccattcaaaaagaggatgcagaaacgagaaatgtgaacctgaaaaaggctcaaaacatcattcaagaattaaatgttaccttaaatcgttcttatgacgtatcaaagagtatggcaagtatgtatgattacatttatcgcagactgattgaagccaatcttcaaaatgacgaagagatgttgaatgaagtagagcaatacgtaactgattttcgtgatgcatggaaggaagttattcaaaccgatcgaaaagggcgccaccactctatcgggggatctctatgagtattgtggaccagctgtatgaccgaacattaaaaatggcagccgaaatagcggcaaatccacaaagtgacaccttggttgaagattttgatgcctttttaattgagagagacgaattaatgagagatattcagcatgagctgacggatcaagaaaaagagaaaatcaaagaaatcatccaaacagatcaacagatggcgaagcaattaactgtgatccaaaatgggataagagcagatattcaagccattcaaagaaagaaaacaaaacagctgaattatcaaaatccataccagcctatgacgagtgacggcgtatattacgataaacggaaataattaggtgagacctgtggcgtatcgttcagatgactatattttattaaccacatattatgaacttctatatacgatagaagagagtctaaaatatttagatgaaattgagaaggattttgctaaaactgaaggggatcggatctttaatgatctgatccatgccttctttcatttagagacaacacatccccttctgctttcaattatagaaaatgagcactttgccaaaacgattcgttcgtttgatcaaatttttttaagttttgatatactagctttctatacattcccttcaatacacttccaatcattccttacatcatattttatacctgaatatagaaagtggatggatgaaatacatgcctgtatgaggccgtatgtcattcattaatttttgttcaattcagaccattcggaggaaattatgagactaaaaaatcaatttttgtttgggcttattgtcatatgtgtattgtttgtcagtattttagggttctcaagctttatctattacaaaacagatcaatcctacaagacgcttctcagcaaagaagtgaagctttatcagacctcactggaattagaggcgcttttgcaaaagcaggaagcgcaaatcaaaacctatgttgtcgtgcaagatgctgaaaatttacagaaaattgagcaaacatatgaagagattaataagaaaacaactgaagcttcaaaaatgagcgctgtcaaacaagcaaaaaatctattagatcaaatctcagaaaaaaattatctttactacacctcaacgaaccgactatttaattcattgaatatgcaaaatcaaaaagaattcaacacccgcctcagtcaagaattacagcctatcgaacaagaaatacatacctttacaaaagaatttgctcaaacccagttgaagcaacgtgaccagaaaatcaatcagctcaatcaagacagtaaccaattactattcacactcattctagttagtgcggtcattattgttggctttttggtgattgggacaagattcgtttatcgtatgacaaagccgattgtttctgtcacaaatgccgcgagaaggatggcagatggtgatcttacacttgaagagattgaagtgacctctaaaaatgagattggccaactcggtaccgcttttaatcaaatgacgactcatttacgtcaactcattttacaggtgcaaaatggatcaagacaattagctgattctgctgctcagtttgaggaaaccattcatcaaacaatatcggcaagtgagcagacgtctagttcgattgaacaggtcggtgaagcttcacgtgaacaatcagacgcggtcggaaaagtagcttctgcgattcaagaagtctcgactggtatgcaaaatgcagctgaacatacatccgatgtttcgggtcactcaatttcagtgactgaaaaggctgaagagggtgcagcacttattcagcaatttgtaaaacaaatgaactctataaaagcgtctgtgaatgaacaccattccacaatggctcatgtacaaacccagtttactggcattgaagatttgttaggtcatatccatgccattgctgaccaaacgaatttgcttgctttaaatgctgctattgaagcggcaagagcaggagaacatggaagaggctttgcggttgtagcagatgaagtgaggaaactggcggaagaatctagtcagctgacagatcaaattagtcaattactcgcgaacgtgaacaaagatactgaaaaatcatcacactcgataacaaaggttgagcaggatgtagcagaaggtgtgaaagtatcgcaattgtctgaacagagttttcatgaaatcctggaatctattcgtgatatttcgatgaaagcagaggagctttcagccactgcagagcaaatttcagctagtacagaggaaatatctcagacggttggggtcattgaagaaggagccaaacgcaattcagaagagacggagtacatgtctgctgctgttgaagaatcattggcggcaaatgaagagatgaaagcagcggcggaagatttaaaaaccttatctcattcgctgaaaacatccatttcatctttcacgatttaaacgtgagctggtctttttcaagaatgagccgaatatatattcatcacctatcaagcaacagttgaagcaccgcaaaattcgacaaatttcaatgaatattcacattttttttacgtttgagcaggagaaaaggagggaaaagtagaaataggtttacatatccttaattttaaaggaggcgttctttacatgaattacaatgtcagaggagaaaacatcgacgtaacacctgcactaagagatcatgtcgagaaaaaaattggaaagctggagcgttattttgaaacagacgtagatgcttcagtcaacgtgaacttgaagttttacaatgatcaagaatctaaagttgaggttaccattccaatgactgatctagcacttcgagctgaggtgcataatgaagatatgtacaatgcagtagacctagcagccagtaaattagaacgtcaaattcgaaaacacaaaacaaaagtaaaccgtaaattccgcgagcaaggtgccaaaaaacacttatttgctggaggaaatgggacggctgatgtagctgttcaagatgacgaagaaattgatgaaacagaaatcgtcagacaaaaacgattcaatttaaaaccgatggatagcgaagaggccattcttcaaatgaacatgttaggtcatagtttcttcgtcttcacaaatgctgagacaaatttgaccaatgtggtctatcgccgaaatgatggcaaatatggactcattgagccaaacgcttaatctgatctaaaaacaacctaaaaaaagtaaacccgttcccttcataaggggcgggttttttgtgcgaaatcattgcaaattctttggaaatgaaggaaggtatggtatgataaatgcaggtaaatatggacctgtcaatcttttggacatgccgaaaaattgcatgaaatagaggagcgttattatatgcttggaatcttaaacaaagtgtttgatcctacgaaacgtacgatcagcaaatatgaaaaaaaagcaaatgaaatcgaagctctcgcacaagatttcgagaaattatctgacgaggctttacgaaataaaacgattgaatttaaagaaaaacttgaaaaaggacaatccgtggatgacctgttggttgaagcatttgcaacggttcgcgaggcatcacgccgcgtgacaggaatgtacccgtttaaggtgcagctcatgggggggatcgcgcttcatgaaggcaacatctctgagatgaaaacaggtgaaggtaaaacgttgacatcaacaatgcctgtttatttaaatgctctttctggaaaaggcgtccacattgtgacagtcaacgaatatttggcaagccgtgatgcagaggaaatgggcaagatttttgaatttcttggcttaacggttggcttaaacttaaacagcttagacaaagatgaaaaaagagaagcgtatgccgctgatatcacgtattcaacaaacaatgaactgggctttgactatttacgagataacatggtgctttacaaagagcaaatggttcaaagaccgcttcattatgccgtgatcgatgaggttgactccatcttaattgatgaagcgagaacacctcttatcatttctggacaagctgcgaaatctacaaagctttacgtacaagccaatgcatttgttcgtacattaaaaatagaagatgatttcacatatgatattaaaacaaaaagtgtacagctaacagaaagcggaatgacgaaggcggaaaaagcattcggcatcgagaacttatttgatgttaagcatgttgcgctgaaccatcacatcgctcaggcgctgaaggcacatgttgcgatgcaaaaagatgtggattatgtcgttgaagaaggccaagtcgttattgttgactcttttacaggacgtttaatgaaaggacgccgttatagtgaaggtctgcatcaagctattgaggcaaaagaaggtctcgaagtgcagaacgaaagtatgacccttgcaacgattacgttccagaactacttccgtatgtatgaaaagctatctggtatgactggtacagcgaaaacggaagaagaagaattccgtaacatttacaacatgcaggttgtgacaattccgaccaatcaaccagtggttcgtgatgacagacctgatttaatttaccgcacaatggaaggtaaatttaaagcagtggctgaggatgttgcgcagcgctatatgacagggcagccagttcttgtcggaacagtagcggttgagacatctgagcttatttctaagctgcttaaaaataaagggattcctcatcaagtgttaaatgcgaaaaaccatgagcgtgaggcacaaattattgaagaggctggtcaaaaaggtgccgtcaccattgcgacaaacatggcaggtcgtggtacggacatcaagcttggcgaaggcgtcaaagagcttggcggtctagctgtgattgggacagagcgtcatgaatcacgacgtattgataaccagcttcgcggacgttctggtcgtcaaggagacccagggattactcaattctatctctccatggaagatgaattgatgcgccgatttggtgcagagcgcacgatggcgatgcttgaccgctttggcatggatgactctacacctatccaaagtaaaatggtgtctaaagccgttgaatcatctcaaaaacgcgtcgaggggaacaactttgattcccgtaaacagcttctgcaatatgacgatgtacttcgtcagcagcgtgaagtgatttacaaacagcgctttgaagtcatcgattctgataacttaaaatcgattgtcatcaatatgattcaatcttcaattgagcgggctgttggttcttatacgccgaaagaagagcttcctgaagaatggaaactagatgggcttgttgaattaatcaacacgaactatttagatgaaggagctatttcggtcaaagatatttatggcaaagaagcagatgaaatcacctccttcatcatggatcgtattaaagaaaaatacgatgcaaaagaagaaacatatggcgatgaacaaatgcgagaatttgaaaaagtcatcgttcttcgtgcggtggattcaaagtggatggatcatatcgatgcaatggatcagctgcgtcaagggattcatttacgcgcgtatgcacaaacaaatccgcttcgtgagtatcaaatggaaggatttgcgatgtttgagcatatggttgcttcaatcgaagatgatgtagccaaatatgtcttaaaatcagaaattcaaaacaacctagaacgtgaagaagtcgttcaaggccaaacaactgctcatcagcctcaagagggtgatgaggagaagacagtgaaaaagaagccggtacgtaaagtcgtagacattgggcgaaactcaccatgtcactgcggaagcggcaagaaatataaaaattgtcatgggaagacagaataagtaatggaaagaggtgaaaacctctttctattcatgtcagcccccatacatctatgaggtgaaggatatggaattagtagaaattagacaagagcttgaaaatatggctagcaggctagctgattttagggggtctctttgacctcgaaacaaaagaagccaaaattgcagaactcgaagcgacaatgtcagaagctgatttttggaatgatcagcaaaaggcacaaggcgtcatcaatgaagccaatgcactaaaggataatgtgaatgcataccatgagctcagtgaatctcatgaagagctgcaaatgacacatgacctattaaaggaagattatgacgaggagcttcatgcagagcttgaaaaagagctgaagaacttaaccaagcagtttaacgagtttgagttgcagcttctcttaagtgaaccatatgataaaaacaatgccattcttgagcttcaccctggtgcaggcggtactgaatcacaggactggggttctatgcttctgagaatgtatactcgctgggcagagcgcagaggctttaaggttgaaacgcttgattatcttcctggtgatgaagcaggaattaaatctgtgacattgctcatcaaagggcataacgcatacgggtacttaaaagcagaaaaaggtgtccatcgtttggttcgtatttctccttttgattcatctggccgcaggcatacgtccttcgtttcctgtgatgtcatgccagagttcaatgaagaaattgatattgatattcggacagaagatatcaaggtagatacgtatcgtgcaagcggcgcaggtggacagcatgtcaatacgactgactctgccgttcgtatcacacacataccaaccaatgttgtggtcacatgccaaacagaaaggtcacaaatcaaaaacagagaacgtgcgatgaaaatgctgaaatcgaaactttatcaaagacggatcgaagaacagcaggctgaattggatgaaattagaggagagcagaaagaaattggctggggaagccaaattcgctcttatgtattccatccgtattctcttgtgaaagaccatcgaaccaatacggagatgggaaatgttcaagcggtcatggatggagatttagattcatttatcgatgcttacttacgttcgaaattatcataaaaactcggcttcttgctgggtttttttaattgtgagaaaatataatgaatataaaggaatacatatgccatactgactctatatcctttgtatgatgaaattagcaaataaagggggaaatattttgggattaacaccattacaagagacgtgggatttagatgccttttttaaaggaggcagttcttcaccagaatttaagacatacctgcaacacattcagcagctattagatgaattaagacaaaaggtcgatgccttttcaaaagaagatacacacattgaaagcaggttaacgtctgtccttgacacgtatgaaacgacatataaaaaactgtctcaagcaggttcatttgtttcctgtcttcaatctcaaaatacaaaggatatgaaggctggcagtcttcgaggtacgattgccaagctggaagctgatttaggtaccattcttgcgctgtttgatcaagcgcttgctgccatctctcctagcaaatgggaagatctcatgaattcagaaggcttttcagatgtgcgctacatattaaatgaacgaagagagcgcgtgaaggatcaattgcctgttgaacaagaaacgttgattcaaaagctagccgtagatggctaccatgcgtgggatgagctttattctagcttggtgaataagattatgattccatttgaacaagatggtgaaacgcagatgatctctgtcggccaagcggaaaatgcgatggatgattcagatcgtgaagtcagaaaggccgtatatcataacttagagcacgcatggacacaggatgaacatctatttgcaagcacgcttaatcatctggcaggtttccgtttacaagtatatgaagcaagaggctgggatcatattttaaaagagccgcttgatatttgccgcatgaaacaagaaacccttgatgcaatgtggtctgtgattgatgaacataagcagccattcattgattacttacatcgaaaagctgacatgcttggagtggataagctaagctggtttgatgttggggctcctattggcagtgaaaccaagatctatccgtatcaagaagcagctgcttttattgtgaaacatttcgctggatttggagaagagcttgctgcctttacagaaaaagcctttaatgaacgctgggtagaagctgaagatcgtccaaacaaacgagtaggcggattttgtacaaatttccctgacagcggggagtcacgcatttttatgaccttctcaggaagtccatccaatgtggcgacactcgcgcatgagcttggtcattcgttccatcaggaagtgatgcaggatgttcgcattcttaatcgcaaatatgcgatgaatgtagctgaaacggcgtcgacattcgcagaaatgattgtggctgatgcttcattaaaagaagcggcaaatgaagaggagcgtctcagtttgttagaggataagcttcagcggagtgtagcatttttcatgaacattcaatctcgtttcttatttgaacagcgtttttatgaagagcgtaaacaaggagaagtgccggcggatcggttgaatgagctgatggtagaagcgcagaaggaagccttcggtgactctttagatgaataccatccacatttctgggcgtctaagctgcatttccatatcacaggtgtaccgttttataatttcccatacacatttggctacatgttctcactagggatttatgcaaaagccttgcgggctggtacttcgtttgaagagaagtacattgcattactaaaggatacagcttcaatgacagtagaagatttggctcataagcatttaggcgtcgatcttacccaaaaagccttttgggaggaagccattggtttagctgtagcagacgctgaagagtttttagaagcgacgaaaaagtaaaaatgaaaagctcctattacgggagcttttttgctggttttagccattcaagcatggtctgaatgatatccttttgctgcgtgagggctggaatgtccgcaggctgatcacctttttgtttgccgtacatgccaaactgagcatggttcccgccttttatttcatggtaaacggtttgagacggcagatttgttttcgatttcttgattttctcttgtgtcgcaagcccatccttttcacctgatatagagagtacgttcaaggacgatgatttcaagttatctgatgctggataagacgcaaagaaaaagagaccgtcgagcttgcgctggtttttttctgcaaacatagcggcagctgttccgcctagtgaatgaccgccaatataccagtgtttgatcgtttgatgaactttcataatatcgtgtgctttgtttgtattaaaaatcgcaaacgaaaatggcatgtcagggataaagacagaataaccttttttcatcagttcattcccaatataggtatacgcaattggttccacctttgccccgggatagagaataataccagtatcgctttttgctgatgcaaatgtatacacatcgtttttatgttccacttgctcgatgttcacttgcttttttaatgcggcggatggtccgtatgtaaagcggctccatgtatagaaagcaccaaaagccaagatgatcagtgcaagtaatgtcatgcctgttatcttcagtattttcttcatcgcatgtcccttctttctcatgtacatattaaatataccatcatttgctcctatgccaaacggcaagcacgctgatccgtttgtgtgataaagtattaatccattagcactgcatttggctgttatttacattcgttttagaagggcttaaaataggtgtgcattcagaagtaacggaggaagaaagacatgaagcagggacattcacaattatggattgaagcgaaaaattacttgttcattttaatcggatcagccattgtggcgattggatttaatacgttattattaccgaatcagattgctgcaggtggagtgagcggtattagtacgattatgcagtcattcggctttgaggcggcgtatgtgcaatggggactcaatattccgctgtttatcgctggtttttatttattaggcgggacatttggcgtgaaaacgctcgttggctctatttttttacctttgatggtgtttgtcacaagacatattgcacctgtgacacatgaagcgctcttagcagccatttttggcggagtggtgattgggatcggaatagggctcgtgttccttggaaatggatcaacaggtggaacggcgctcgctgccaaaatcatcaataaatatacaggcctcacgcttggcacctgtttagcgatgatggatggcctaattgtcctggctgcgatgactgcttttgggattgaagagggactgtacgctgtcattggtgtgtttatttcaagtaaaacgattgatgtcgtacaggccggcttcagtcattcgaaaatggcgatgatcattacagggcatgaggatgaggtcaggcaggcagtatttgatcaaattgaccgtggtgtcacaaagatctcagcagtcggtggatataccgaccatgaccgtccaattctgatgtgtgtcgttgggcagtcacaattcacaaagttgaaacaagtggtgaaagcaatcgatgcatcagcatttgtcatcgtaatggatgcaaaagaggtgcttggtgagggttttaaaagggcgtaaacaaggatataatagcgttgaccaaatgattgtaagggagggaaattgatgaaaaaaagcggattaatgatgctgtttgcagtgatgcttcttgttcttgcggcttgtggaggaaattcaagcagcagtgacaaagaaggcagcaaaagtgcttcaactgtgagcagtggtgaggaaatttatcagcaaaactgtattggctgtcatgggaaagacctatctggtggaggcggaccaagcctgaaagaagtagggaagaaatataatgaaagccaaatcgcagatattgcacagaatggtaaaggctctatgccaagcggaatggtagatgagaagcaagcaaaagaagtggcaaaatggcttgcagagaaaaaataaaacctttgtctaatcgacaaggtttttttgtttttatatgtagaaaaagacttttgaatagtatgaaaacgtattatattaaattttattaaaaaaataagggtaaaaagacatgtttatcggttttaattgttctttttaccttttaactataagttttgaaatataaatgtaataccattgcgtcgattcatgacgtataattggagttgttgaaatttagacgattcatttttttcatctttttggatgaaaaggacataaattgcttgtacgtatcgaagggtatgtgcgtgaccatacataacgttttttgacgataagtgtcaaaacatcatgataagctgttagtcagcaataagaaaagattaggtgattacatgattgaaatgaaggaagtctacaagatctatcctaacggtgtaaaggcgatcaatggaatcaatgtctctatccacccaggagagtttgtgtatgttgttggtcccagtggtgctggtaaatccactttcatcaaaatgatgtatcgtgaagagaagccaaccaaagggaaaatcttaattaatagcagagatttagcctcaattaaggaaaaagaaattccttacgtaagaagagaaattggcgtagtattccaagatttcaaactacttccaaccctcacggtgtttgagaatgtggcatttgctcttgaagtcattggggaacagcctcatatcattaagaaaaaagtgttggatgtacttgatttggtacagctcaagcacaaagcacgacaatttcctgaccagctgtctggcggtgaacagcagcgtgtatctatcgctcgctcgatcgtgaatagtcctgaggttgtcattgcagatgagccgacaggaaaccttgatccagacacatctctggaaatcatgaagacacttgaagagattaataaccgcggaacaacagtcgtcatggcgacacacaacaaagaaattgtaaacagcatgaagaaacgtgtcatcgcaatcgaagatggaatgattgtgcgtgacgaagcaagaggggagtacggcatttatgattaaaactctctcgcggcatttacgtgagagcttccgttcacttggaagaaacacgtggatgacatttgcatcaattagtgcggtcactgtcacattgattttagttggggtttttcttgtgattatgctcaacttgaataacatggcatcgaacgctgaaaaagaagtagaagtaaaagtgttaatcgaattaacggcgaatcaaaagcagcaggatgaattaaaagcagaaattgagaagattcctgaaatcagtgatgtgaagtactcatctaaagatgacgaactaaaagcgctgattaaaagctttggtgaaaatggacaatccatgggacttgttgatcaagaaaacccattaaacgatgcgtttattgtgaaaacatctgatccacacgatacaccaaaagtagcgaagaaattagaaaacttaaagggtacgtataaagtaacctatggaaaagaagaagtcagccgactctttaatgtggtcggagtggcgcgaaatgtaggtattgcgctcattattgggcttttatttacagccatgttcttgatctctaatacgatcaaaattacgatttttgctagacgtaaagaaatcgagattatgaaactcgtaggtgcaacgaactggtttatccgctggccattctttattgaaggattactgcttggtgtatttggttctattataccaatcgctctattgcttggcacatatcaatatgcagtgggctgggtggcaccgagagtacaaggctcatttatttccatgcttccatataacccgtttgtctatcaagtttcactggtccttctattgatcggtgcaatcattggtgtatggggaagcttgacgtccatccgtaaattcttaaaagtataaatctatttttgatggcagcactcgagaatttgatagaaggtgtgaccggttgaaccgattcatccggtcgactctttatgcaggcagttgtcataggaggggaatatcgttttgaaaagaaagctgatgatggctggaatggcagcgtttattggaacaacgtggctatacattccagggaacgagaatcgtgcattcgcatacgaagacctagatcaaaaacgtcaacaaatcgaagagaaaacatcaaagactgaatccactttgaagaaaaagaaatcagagctggctaagcttgaaaagaaagaatccaagctcaaaaaagaaattgaaaagattgaccacaaggtaagtgctgcaactgaaaaagtcgctgaaaaagaaaaagaagtcaaacaaacgaagcaagagatcaagaaactaaaaaaagacattcaagtcatcaatgatcgaattgaaaaaagaaaagctatattcaaagatcgaattcgttcgatgcaaaaaagcggcggtacgatcaactatttagatgtgctgctgggtgctcgcagctttagtgattttgtcggtcgtgttggagctgtcacaaccattgtcgaagcagacaaagacatgattacagaacatgaaaatgatttaaagctggtggagcaaaaagaagcagagctaaataatcagctaaatggacttgaaacatctctgaaagagctagaagagttgaaaaaggatttgtctaaacagcaaaaagaaaaagagaaaatcttaggggatgtaacagataaaaagaaccatgcccatgatgaattaggcaaacttgaaaatgaacaagaaattctagcgaaccaaaaagcggctgtgaagtctgaggaagcacgccgccaaaaggaagaagcgaagagagcagaacaagcagctgctgaaaaaagtgcacctgcacctcaaagcggcggctcggatcaagtatctgatacaccagcaagcagctccggctttattaaaccagctgctggccgattctcatctggctttggcggacgttcaggcggacagcactacggtttagatattgcagcaaaaggcacagtatctgtcgtcgcagctgcagctggaacagtcacgaactcaagctactcatcgagctacgggaatgtgatattcattacgcataatatcaatggacagacctatcaaacggtatatgcccacctgtctacaagaagtgtgtccacagggcagagagtcgagcaaggacaattccttggatatatggggaatacaggccaatcacatggtcaacatctccactttgaaattcataaaggattatggaatggcgctaaatcaaatgcagtcaatccagcgcaatatatccgctaatcaaaaagccgataacatcatgttatcggccttttttattctaaatgaaattaaaataacagcagtaaaccggcaataataggtgttaacagtacagccgacttcaataagagcttcggtgcaaggcgtgtgaattttgcgccaataaatgcccctaatactgttccgattaaaatttgaatcagcaagataaaatcaacatagccctctgtaatatatccaattccaccaccaatggaaatcggaataatgacaagcattgtcgtgccaactgcctgtcgaatggaaagtctcagtaaaatcaaaagtcctacttgaataaatggtgcagacccgataccaaacatacctgacagcaatccggatacaagtcctaaaataataccccttatgagcagctgacgtgaagaaagcggctgatgctcagtgtcttccttaagaacaaataatttgatcatcataaacacagcggataaaaagagcattccagctgttaaatagtgcagactttcttctggaataaaaggagcaaccttagctcctgcaaaagaagcaacacaagccaaagctccgacaatcaaaccagatttcagctgaatattcccttcccggtagtggctgtatgcacctgataacgtcgtaaatgccattgcggctaaagacgtcccgagtgcggtatggatagggatatcaaaaattaacgtaagcaatgcgatgacaaaaccagccccgcctgctcctacaaatcctaataaaattcctaataaaagcatcgtcaatataatatacatagcgaagactccttctcgatcataacaaaataaaaattacacctaatgaaatgattagtcaagccttcgcgggagaatgtctttacatgaaatcccttcttctggcatataataactcaggtcatcaggaagagttgaagaaggaggccaaatatgaaaaaacaaatcgcatctattatggcaagtgtcgttctattaataagtgcaggggtgatggcgcataaagagggaactcatgcggagtcaccgcaagcagctgctgcaatggctggacaagctcaatcaagtgataaggcgaaagagaatgggatggagaaaatcgagaaagcctatgacctgatatcgaatgaatatgtagaggaagtggatcgccaaaagctgcttgaaggcgccattcaaggaatgctttcaactttaaatgatccgtattcagtatacatggacaagcaaaccgccaagcaattttctgattcgcttgattcttcttttgagggaattggggcagaagtgggaatggatgaaggaaaaatcattatcgtctctgcctttaaaaaatcccctgcggcaaaagcaggtctaaagccgaaagatgaaatcatcagcattgatggtgagccgatgaaagaaaaaagcttaaacgatgctgtactgaaaatcagaggaaaaaaaggaacatctgtcgctctgaaaatcagacgaaatgggattgaaaaagagttaacattccatatcaaacgagaagaaattccgcttgaaaccgtgacttcttctgtgaaagaggtaaatggtcataaaacgggctatatcgcgatctctagcttttctgaagatactgcgaaggatttcacgtcaagcctgaaacaactcgagaaaaagggcatagaaggtcttgtgctggatgtgagagggaaccctggcggctatctgcaaagtgtagaagacattttgaagcattttattacgaaggatcagccttatattcaaattgcagaacggaacggcgacaggaaacggtatttttcaaaacggaaagaacagaagccttatccagtcaatgtcttaatcgataaaggcagtgcatccgcttctgaaatacttgctggtgctatgaaagaagccggaaaatatgaagtcgtcggtgatgtctcctttgggaaaggcactgtgcagcaggcggttccaatgggtgacggcagtaacattaaattaacgctgtataaatggctcacgccaaaagggaattggattcacaaaaaaggtgtcgtaccgacaattgcgattcatcagccagattactttaccgtaggcccacttcaactgaaagaaccgcttcagctggatatgaacaatgaagaagtgagacaagcacagacgctgttaaagggattgtcattcgaccccggcagagtagacggctactttgatgaagaaacgaaaaaggcagttctagccttccaaagcacatacaatctcgataaatcaggtgtgattgatctgaagacagcgaaaatgatgaacaaaatggtggatgaagtgaaatcctatgagaaaaatgatctgcaactgcagactgcactaaaagcactatatcttaaaaaataaagaggcgaataaatgcctcttttttttggttcataagtgtcacgaacatgtaatagtttattcttaaaaataaattatatcgagaaatatattcatttattttacaaaaaacataacattccttcgattttacccgataacatatttatataagagactttctgttgatttaaacatgtcatgaaaatgaaacttttgaaagttgtatgttacataaataattcttacaatataaagtagcactcattttaaatattttattttttgcggatattcagcttgagcattaagctgtaccgaggtttgcgcttttcttaaaagaactagtaaatgggggtacacaattgaaaagggcaagtattgtgagagagaaaaaatattacgagttggtagaggagcttaagagtcgtacgaaagatgtgacgttttccgctacaaaggcattaagtctgctcatgctgttaagcaggtacttggtcaattacacaacggtagaatcagtcgacgaaatcgatgaagactgtgctgagatatacttcaattatttaatggataatcataagagacttggtataaacttaaccgacatcaagaggtcgatgcagctgctcggcggcatactagatgtagatgtcaatcactacttaaaagatttttcactgtcgaatgtcacactttggatgaatcaggagaaataaacctggtgtcaagcatcgatttatttgatagaataagagaaaatgcttgacttgggcggtgaacgataatgagctcggagtggatgggagctggattaaaagcggtcggtctgtttttaatccaccctcttttttatttcatgatattaatcagcctgttacatggctacatccgcgtaaagcgggagagaaaagcgtttcaaacaagaatagaagatgtatacgatgaacttaaatttacatattcaaagggatggattctagggatttgcctatccgtcatttcagtaggcttagggatttccctcccgcctggattcatcgtgctgattgcagcgatgaccatcgtttgctctttattctttaaggcgagtgcgctttcgtctgcatacacactcggtttcagttttattgcggcacttggactaatgtatgtccaagtgagccattcttggctgccgcagctctcaatgatgaatgcatcagccgttgttattttgctaggtcttttattaatgaccgaggggattctagcctatcgaacggcgcatttacgaacatcgcctgcaatggtgatgagtgcgagaggacttttgattggccagcagcgggcaaaccgcctgtggcttttaccgcttgttttgctgatgccggcaggtgaatttacttcttctctgccatggtggccggtgcttcaagtacacgatcaaagcttttcatttattttgattccatacatcatcggtttcgggcagcggattcaaggatcactgccaattgtgagcattcaaattacggcacggcgtattctcatgcttggaatcgctgttgctttactaggtgctgcaagtatttggtttgagccgattgcatggggagctgtattgatagcgattgtcggaagagctttcctctcatggaaacagagagtcaatgacaatgcggctccattctacttctctaagcgtaatcaagggctgatggtgctgggaatcattccgaatacacctgcagctgatttaaagcttgagatcggagaagtcattacaaaggtgaatggaattgaagtcaaaaccgtttcggaattttacgaagcccttcaaaccaatcgtgctctgacaaagcttgagatcattggcttgaatggtcagacaaggtttgagaaacgcgcttcttacgaaggggagcatcatcagcttggcatcctgtttgtgaaggatgatccacagcaagaatcaacggcgatttcatcataaaaaaaagctgctagagatggcagcttttttcttttgggcgagcttcttttccataggattcgccccattcacgcatagcgaagatgatgggttttaaagtatctccaagagaagtgagtgaatattcgacacgaggagggacctcctcatagacttttctgtgaacaacgccgtcttgttctagctcgcgcaattgcagcgtgagaacacgctgagaaattcttggcagaagccggcgtaattcgttgtatcgttttggaccgcaagtcaaatgataaaggatcactcctttccattttcctcctattacactcgttgtggttgaaacgggacagccatgattgacaatactgactggattggatggtgcactcatctttacactcctttctaagacgaaatgggtgataaacgaacatgattgtacctaacgaacaaaaatgtgcgtacttgaatcaatggaagcttttcttttaccatagagatatcacatcacacattcgggctgtttgttttattatcataacaatttctatatgggaatggaaagaaattggattgatgaaacttctcaccctaatcgttcactagaaaggatgaataccatgcgagacaaagagcaattaaaaaaagaaatcattgaggcgtatgaattccgtcatgcgacaaaagagtttgacccgacgaaaaagattccagaagatgactttgcgttcattttagaaacaggaagactttccccaagctctgtcggatttgagccttggaaatttctcgtcgttcaaaatgaagcatttagagagaaattaaaagaatatacatggggtgcgcaaaagcagcttccaactgccagccattttgtgatcattttggcaagaacagacgcccggtatgattcagcatatgcagaatacatcaacaaggaaatcaagggaatgacagacgaaacgtttgaaatggtaaaagaacgctacaaagaattccaagagaatgatcttcatttgatggaaaatgaccgtacgctcttcgattgggcttccaaacaaacgtatattgcccttggaaatatgatgacagccgcggcacaaatcggcattgattcatgccctgttgagggattcagctacgatgagattcatcgtattcttaaggaagaagaattacttgaagatggtcagtacgacatctctgtcatggcagcctttgggtatcgagtcattgagccaaagcgcggcaaaacgcgtcgtccgatggatgaagtagccgtttggattcgttaaaagaaaatgtctgaaaaaggctgttgacaattgcgtggttagtcagtatatttaaaaaataaaatctttgataaatagacaaattgactataaaacgctttgacttgagaatagtaaatgaatatccgttttctaagagagctgcggggtggtgcaacgcagtaaaacgaatcattgaactcgctcaaggagcggcaagactgaatgaatagtaagtctttacgtgtgacctccgttatcgggtttcaagttggattcagctatgtctgaatcaataagagtggtaacgcggttgcaaggtcagtcgtctcttcaaggagatgactggcctttttatatgcttttatcttatatttgtctgaagattcaaatttaaaggagctatagaaaatggaaaaggaacatgtgcagttaaaacgaacaatgacgtcaaggcatatcatgatgctcgcacttggcggtgccatcggtgctggtctgtttaaaggaagcagttctgccattgatatcgcgggccctgctgtcattttggcatatatgattggtggtcttattttattatttattatgcaaggacttgccgaaatgacggttgcacgacctggcgctagaacatttcgtgatttaattgaacctgtgttaggcaaataccccgcctatttcttagactggatctattggaaaatgtgggtgctgaacattgcagcagaagcgatcgtgtctgcaatctttattcagtactggttcccgcaagtaccaatatggacacttgtgttaatcatttcacttgttgtgacattgatcaatgtttgttcagtcaaaatgtttgctgagacagaatactggttagcctctataaaaattgctgtcattcttttatttattatcattgggttaacgatgctgtttgtctcattcggacagcatgcagcaccgggattatccaacttaaccgaccacgggggatttttcccgaatggaacgggcggcttaattgcggcaatgctggtggtcgtgtattcatatgggggaactgaaatgattggggtcacattagcagaaacaaaaaaccctgaaaaagtcatcccaaaggccattcaaagtacatttgtacgaatcatcggtttttatgtacttccgttcttcatcatcgtcagcttgattccttggaatcaagtaaacaatgagcaagtgagtccattcgtcacggtgtttgcaacgattggtgtgccatatgcaagtgatatcatgaacgggattattttactagcgatcttgtcttctatgaactctggtctgtatgcttcttcaagggtactatttacacaggcgatggatggccgtgtatggaagggtttttctaagctgtcgaaacagcaggtgccagtcagagcgattctagtatgtacatctactttgtatgcagccgtattaatctctctttttgtaggaagtcaaacctttaattatttaatgggatctttaagctacacagtcttattcatctggtttattattgctgtcgggcatctaaagtctcgaagcgtaacagcaccaggaggatatcgcgtcaagctgtatcctttcacgacatggttttctgtcattgcgatcattgccatttttattggcgtagtatcaacaactccgatcgtccaaaccttggtcacaatgggtatctatctcatcatcactctttctttcttcatcaatagaaagcggtttgaaacagttgtttaatttaaaagcgtgcaggacttttgaagaaggtctggcacgcttttttaatgtagttttattgtttgaactgaagcaatcgactctccttttgaaaggaattgatgcataaaagtagatgatcaaaaaggggctgaaaatagctgttcgaatttagacgactgatgcgtatatatggatcaagcgaatgaccctacctttaaaatcgaatttgttatgtcgtaggcaggtctttatcgatcggagtatttggcagctgaatgatggctgtcgtactgcatcctggctcagattgaatattgaacgtgccatgatgttttttcatgatttgatagacaatggctagtccaagaccggagccgccatcttttctcgtacgtgccttatttactcgataaaatcgctcagaaacatgtggaaggtcttcttttggaatgccgttgccctcatctgtcactctcaattcagccatatgctggtgaattagtaattcaatcgagatcgattttccagagggagtgtaatgaatggcattgtccagtaaattacgaaccacttgttgcagccgatcgctatcgccatacacaatacaatcctcatcaagtgttcgtttcagataaatgcctttttgattagcgataaatgccatttgatcaagaacgtcatgaatcagctgtgcaaagacaattggctccatcgttagtggataagaatcaccttctagctgcgcaaggtctaaaagatcgtgaacaagccggcttaaacgtgcggcctcatcctggatgatgtgcattccttttttttgatcaatgatcccttcttcaattccttcagcatatcctttcatataacttagcggagtccgaagttcatgagagacattcgcaagaaattccctgcggtgctgctcaactttttcaagggtagaagacagtttgttaaaggagcggctcagctggtttaactcatctccgtttttggtcacagccatacgttttgaaaaatcaccagattccatttccatagcaatttctttcatttgattaattgtccgcacgactttattggagcttttatatccgataaagaaaatcaggagcaggatcaataaaatggatatgccaagtgtcaatctgatttggacaaagggttcatacacatccgataagggcatggatagaaaaattgtccccgatagctcatctttgcttgagaaaacagggatagcgatgccaagaatatcttgatgaaactgtgagtgttctctaatcagcacgacggtttccccttgaaggagcttttggcgttccttgaacgtaatgagattatcatttgtgttcgtatcaaaaggaagaccacttgaaagctccattgggtcatctgtaaaaataatgttcgcctgacttgagtcgtttgcccattttattctatcggtaaaatacgtatctttcccgtgtttatgatagatttgtgccaactttttaccttgtaaacttaaggaatcgatctgtttatcaatatataagtgctggtataagtaataggtaagggcaagagctgaggcagcaacgattccggtcactacaaggattaagaagagcactttctttttaatcgataaaggcttcattcttcctcctcaaacttatagccgacaccccaaacggttttaatatgccgttccgctccctttaatttcagtcgcagcgttttgatatgtgtatcgactgttcgtaaagagccgctcgtggaatgtgattcccacaatttttgatagagctgttctcgtgaaaacacttggccttgattgagtaaaagaaacatgagtaaatcgaattctcttctagttaaattaatgggctcctgatggatatagacttgtctgccatcctgatcaatctccatgtcaccaatctgtattcggctgcgctttagcgaaagacctctaattcgtctcaaggttgtttcaattcttgctgcaagctcacgtagactgaaaggcttcatgatgtagtcatccgcaccaatttctagacctctaattcgatcctcctcataacttctagctgttaagaataaaatggggatttgagatgtttgccgaatacgctgacagacttcaaatccatccatatcaggcatcatgatatccagtacaacaaggtcaacgggttctttttcaagctgacgtaaggcatccattccattattagctgtgatgatgtgaaagccttgtctctttaaaaaggatccgattaactcaagcatatcgaactcatcgtctacgattaaaatatgcatttgttctttcatttcttttcctccaacacgatagcataaggtcctgatgggacattcagtcgatttttcatcatgaatgtatgtttatcgataattgatactgaattgtcatctaagttactcacatatattgatgtggtatcagcggtgatataattcgggttttgaccagtttcaacagaagcaagctgcttatttgtctctgtatctactttgtacagagtatgatctccatgacaaagtacatataaagtagaagaatttttctctgaaaagaatgcaacgggcataacgcctagtttcatttctcgctgctttttacctgtttttgggtcgtaagaaaaaatgcttttatttaaggtaccttgtttaccgtgtccaccgacccaaatggactttccatcaaaatgaataccagaaggccgttcaagtacagagaacgtacgtatatgtttttgcttctcaatatctatgacggagacagtatgactttctgcatttaaaacaaataaagtacctgaagaagaaagtgtcatagaagaaggtaactttccggtcttcacagttgcttttatttttttacgctgcgtatcaataaaataaacgacatttttctgtgtatccgctgcaattaaggtgtgagaagctgcatcatatgtaagagaagtcagccctttattcacatccatataatctgttgctgtacctttttttaaattaatttcgataagcgattctccttctttacttgttgcaatgatgacgtctttgttgatttggataaggtcagtgagcggatgttttaaatcaacggaagagatcattttattcttttgtaaatcaactattgaaaaggaagctttttttaattgagagatgaccgcgatcgattgagagctgccaggtggattaaattgctggtctttgccacagcctgacaggaataatattagagctgataaacagatcaaaacatattttgcacgttccattcttccgctcctttgcgtcctatattttcaaaaagcataccacaaaaattgtgaaaaaaaatcgaagttatcagtactggaagagatgaaaaacagcttttaggtgggtgaacggggacaatttcgatcgaaagttccttttttgtctagtcatatggctttttttcatctttaaaaaaggattttcaatatttgattactgtacccgctctagcttacagtgatacaaatgatgaaaactcccccgctctaaatcaacatagagcgcagggagtcattaggcggaatgccccgatgatggagaggtggaacttgttttgacgcgttgagataaaaggaaaccaaggattcctgcgcccattaatacaataaataaagattggaaaccactcatgataccaatcaatgtcgatgaaatgatactgccaaaatatcgaaaggtagagaaaataccagatgccgaaccagataagctttgatcaacagcagttaaagaagccatctgcatactggtcataccaatccctgatgaaattccacctgcgattagtgtcacgattagcagtggtaaggaggggtactgactcagtgtaattaacatgatgcctgataaagtgaggcagagaaatgaaaagcgaatcatttttttcgcgccttttttcggatgaagtctagcccctagcaaaccgctaagagacatacaaagcgaaaataccgataaaatcataccgccttgtgtatgagaaagggcaagttgttgttccataaacagcggcataataagaaggatggcgtacatgacaaaattacttagcatgatcgacagattcgcatttgtaaatgaactgtttttaaatagggacaaatcgatgatcggattctttactttccgtacatgtttaaagaataaaggaatcacaatcaatgctaaaatgccataaattaaatattcatttagtaactggctttttgtgcatagaatgattgtggcaattccgatggttaaatacaatgaaccgatgatatctacccttgcttgtaagcgtgtatgctttatgtttggaatgagtaaaataccggtgacaagtgtaagaaacagaaatgggatattcactaagaatatggaatgccagtcaaaactctgaatgagaatcgatccaataaaaggtccaagtgcggcaccaataccagcaccaaatccaaagtaacccattgttttagacagtttttcgggtgatactgttgcacgaatcaatgcaatgctattcggtgttaaaatagccccgccagctgcttgaatggatcgaaagatgatgagaaatgctagattaggtgctaaagcacagccaatcgagccgattaaaaagagtgttactccggttaaatacatgcggcggtgtccgtatatatctcctaacttaccagcgataggctgagtgaccgccatgactataagataaattgtgacaacccaagtaatgtttgaaatggattgatcataataagttgatatggatgatagagcgactgcgatcatcgttgagttgaccggaactagtatagctccaagtaacaaagaatagatgatcaagctctctttttgtaacctcaatgtgtataccaccttttgtaaaaaagaagaattccaccctttaagcgggagaaattcctctcatgaaaatgtgtgtgtatgtctcaataaaatcatctttttgtgttaaaacgagttgaaagtcttgctctagctgctgaataaaaaaaccgaaatacgtactaatgaaaatgtctgcataaatgtcttcttttccttttaagacatgatgctgagcactcatctttttgaaatattgtatcagcatttcccttagttcttgaggataaattttttcatgactggtcaaatctttaaacatagccggttctcgcatgctgatataaataaattctttttttgaagttaaatcttcaaggaaataggaaccgagaaactttaaatcggtgtataaatcgcctttaaattctgcttctaaggttttcgtcggtgttgatttcattttcataatggcagcaatgacgccgcgtttgtttttaaagttgcgaaaaatagtcgcttcactgacattcgcttttgtggctatttctttggttgtggttttttgatagcctttttcagttaataaatccattgttgcgcgaatgattcgttgatttgtagattttaacaagcatactcacctcaggttatgaatgtgtttgcaacaaagtaagtataccgataaaacctatgaccgccaatatgacccaaaacgataaagttagacacgtgcatgctgttttaatatctgaatgcgtccattgctaccatctactgtcacaaggtcaccggattgaagtgtttcagtcgctattcgggtacctaggacagctggcatcatatactctctagcgataatagctgaatgagacaaaatgcctccagcatcggttatgactgcttttgcatctctaaataagctcgtccataaaggtgtggttgttttgcaaactaaaatatcatccttttgaaattgtgagaattcctcagcacatgtaatgacttttactcttccagaaacaataccgctagatgcgccaattccatagatcatatcgtttgtgttattttcattttctcttaatgaaccgagcattttttccacttgctgcaattcagcttcagttggggtgcccatataagctggtggttgaatgtcttcattttctttcatttcgatttttctttgtgcaatgaccgtatcgaatgttgtagacgttgtgagcgctgtgtgtacctcctcatcgtagagataccatagatcttcttgatgaggaatcgctcctttttgtacaagaagttcgccaatttttaatagatatactctggctttagcatctaacatggcatcaatgtagaagtgatgatcatcacggatattagcggcctgtagggcaaattgataaagtgtctcaaattttgttttaaacgcttcatccttcacttggctcataaaatgttcatatgtctcttgtcttttgatgacggcttgtgcaaattcttcatcaaaatcacattgggactgaatgttgtttctgatgatatctagtataaactcagggttttccacccatgtttcttccgtaaggtcatgacttttaacagatcgccagccatagacttgaagaaactcctctaattccaaaatgaagtgtctgcctttttccgagtgattgagtgcatcaagcagctctgggttcttttcatgcttcataaatgcttgatgaagttcaggatcttgaaggacactctttgcaaaatcagaaagcttcttgtctgtttcaagagatttgttcatcacgcctatcaacatctcatgcagcaggaccacttgtgtttgatcaccagtatatgtcacaagcatgtcttcgatcatagccgatagaataacttgtggtatgacaatatcaaaatgatcatcgtaggcttgtatataaaaagcctttaattcttcgaagccgatgatggcttcttcaatggtcataggttccttcatttggtgatcgagtttttcgtaaaagggaaagaaatttttctctaaaatctcatacatacgttcacttaaatgcggaaataactcaaatatgcactcatcaaaaactggagcagcttctgcactcgcttcaggcagtgacggtgctgagtacaggtggcctctataaagcttgatatttttaatattcagatcaggtacttgatatttttcaccatttttcttcattccgctttttaatgctgggatgatcagacttgaaaagagaggactcgttggcccaggcatatgatcgtccattgagatccagaaatcctgcagctcatctggctgcatttgaaaagaagtacccgctgtttcatctgctgcttttgagagggctgcggtaatcggcctggcttgaagtaaataaaatgtgccatttgctattccaaattcgatatcgacgctatgtccataaagtgcttctacttgtttggtgatttgcgtgatttctactaattcgtcatcattcaggcaatattgcccagccatttcctccgttactgactgttcaatgacaccttcttgataaggaataatttgcagctctttcgttccaagtgatttttcaatagaaagtgtctctttgtctacaataaatgtgtctggtgtcacaagcccggagacgattgcttctcctaatccgtagcttgctgtcagcatcatttcatttgtttttcccgatacgggattctcactaaagatgactccggagacgtcagaatggatcaatccttgaacgacaacagccatgagcggcatctcttcctcgttttcatccatctcttccttatattctgtcactctcgctgcaaaataagaagaccagcattctttgacagcctgtaagaattcttcatttgttttgatatttaaataggtctcgtactgtcctgcaaatgaggcgccttcgagatcttcagcaacagaagaggatcgaactgcaactgagggataagtcttccgcaatgattgaaaggacgaaaggagttctgcttccatttgagaaggaaacgatgcttctttgattttgttagcaaggttttgttcagttggatgcaggttgtgatatgaaagaaagcttgaaaagctgttggttttgataataaatccatctgggactggcagtccgtgattgtttaatttaattaaattcaggccttttgcccctgcgagtgctgcggattcttcagccgcatgaaataaaactgaatacatgggaatgcccccttatccaaatagccaatgatttgtatgtctctctatagtttttaaaatgatagtgcgcactatcattttaatcataggatgtattggatgttactgtcaaagacggaaagacctatctttacaaaggggacattctcactaatttccttctatatctataacaaaagtctccgaacagaaagaaaaataggtgaaattgaaaactgtgaattgttcaatatgccaatctttactataatcaaggaagtagaccaagaagagggagggtttttgtgattacaaaagccatatttgcacttgtttttcctttcctgctcgttattttattttcaaaggttacttataatcattatgtgggcattgcattaacagcagcgcttttatttgcctcgtacatgaagggctatacagaaacctactttattgtgggattagatataatttctttagtagctggggcattatatatggctaaaaaagaaattgaaaaaagagaaaaggctgaaaaacatcattgatgtcatcatcaagagcgtgctaggccgaaaggtgacgttttttaagctgtgcttacgaattctagtgagtgcagctttctttttgtgatctttttctgctcatcgaatatctctcaccaaaatgttccatactgaaaggaaggttttcgtaagagggttatttgccatggaagagagggtatgactgtattggaaataaaaatcaagcaagagccgaactttagttcgtatttttgtgttcttttatgataatatattcattagatagatttcgtaacgaaacggaggctttgatgtgagtgaccgctttgaattagtttctaactatcagccccaaggagatcagccgaaggcgattgaaaagcttgttgaggggatccatcaggggaaacagcatcaaacgctgttaggtgctacaggtacgggaaagacctttactgtatccaacctgatcaaagaagtgaacaaaccgacacttgtcattgcgcataacaagacacttgccggtcagctatacagcgagttcaaggaattctttccgaataatgctgtcgaatattttgtgagttactatgattattaccagccagaggcgtatgtgcctcagactgatacatttattgaaaaggatgccagcatcaatgatgagattgataagctgagacactccgctacttcctcgttatttgagcggagagatgtcatcatcattgccagtgtgtcctgtatttatggcttaggttcgccagaagaataccgagagcttgtgctgtctttacgtactgaaatggagattgaacgcaatcagcttcttcgtaagctggtggacattcagtattctcgtaatgatatagattttcagcgcggaaccttcagagtacgaggagacgtcgttgaaatttttcctgcttcacgtgatgagcattgtatcagagtggagtttttcggtgatgaaattgaacgtattcgtgaagtggatgcactgactggagaaatactcggtgatcgtgaacatgtggctattttcccagcatctcacttcgtcacaagagaagaaaaaatggaaaaagcaattattaatattgaacaagagcttgaggagcagctcgaaaagcttcgagataatggaaaattgctagaagcgcagcgccttgagcagcggacaagatatgaccttgagatgatgagagaaatgggcttttgttcaggaatcgagaactactcaaggcatctgaccttgcgccctcctggttcaacaccttacacattgcttgattatttcccagatgattttatgattgttgtcgatgagtcacacgtgacgatcccgcaaatccgcgcgatgtacaacggggaccaagcaagaaagcaagtgttggttgatcacggattccgtctgccttcagcacttgataacagaccgctcacctttgatgagtttgaaaagcatatcaaccatattgtgcatgtatctgccactcctggtccttatgagcttgagaaaaccccagaggttgtggaacaaattattcgtccaacaggtttacttgatccaatcattgaagtgcgtccgattgaaggtcaaattgatgacttaattggagaaattcatgctcggattgagaaaaatgagcgtgtgctcgtgactacgctgacgaagaaaatgtctgaggatctcacagattacttaaaagagatcggaatcaaggtcaattatctgcattcagaaattaaaacccttgagcggattgagattattcgagatttacgtctcggaaaatatgatgtgcttgtgggaatcaaccttcttcgtgaaggactggatattccagaggtgtcgctcgtgacgattttagatgcggataaagaaggctttttacgctctgaaagatccctcatccagacgattggccgtgcagcgagaaattcagaaggccgggtcattatgtatgcagataaaatgaccaaatcaatggatattgcgattcaagaaacgaagcgcagacgagagcagcaagaggcgtataatgagaaatttgggattactccgcaaaccatccataagaaaatcagagatgccattaaggcaacaaagatacatgaggaatcggaagaatatgaaacaaatgcagcaccaaagctgtcaaaaatgagcaaaaaagaacgagaaaaagtgatcgaaaaggtcgagatggaaatgaaagatgcagcaaaagcgcttgattttgaaaaagcagcagaattaagagatctattgctagagctaaaagcggaaggatgattgcctgatggctatggaacgaatagaggtgaaaggtgctagagcccacaaccttaaaaatattgatgtgaatatcccgcgtgaccagctagtggtcatcacgggtttatctggttcaggaaaatcgtctcttgcctttgataccatttatgcagagggtcagcgcaggtacgttgaatctctttcagcgtatgcgcgccaatttctcggtcaaatggataaaccggatgtagatgccattgaaggtctttccccggcgattagtattgaccagaagacgacgagccggaaccctagatcaacggttggaaccgttactgaaatctatgattatttacgtctcttgtatgctcgagtcgggaaacctatttgtccgatacatggaattgaaattacgtcccaaacgattgagcagatgacagatcgtattttagaatatccagaaagaacgaaattgcaagtgcttgctccggttgtatctggccgcaaaggaacacatgtcaaagtacttgatcaaattcgaaagcagggctatgttcgagtaagagtcgacggagagatggaagatctgtcagaagagatcgagcttgaaaagaacaagaagcattccattgaagtcgtgattgaccgaatcgtggtgaaggaaggcgttgcggctcggctgtctgactcccttgaaacggcgctgcgactaggtgaaggccgtgtgatgattgacgtgattggacaagaagagctgttattcagtgaacatcatgcttgtccgcactgcggattctctattggtgagcttgagccgagaatgttttcatttaatagtcctttcggtgcctgcccgagctgtgatgggcttggctctaaactagaagttgaccctgagctcgtcattcctaataaggatttgacgttacgacagcatgctattgccccatgggagccgcaaagctcacaatactatcctcagcttcttgaggcagtatgtacacattacggcatcgacatggacattccagtgaaggatataccgtcgcatttattcgataaaattttatatggcagcggctctgaacggatttattttaaatatgaaaatgattttggtcaggtacgtgaaaatgaaattgaatttgaaggcgttcttcgtaacattgagagacgctataaggaaaccagctctgattatattcgtgagcaaatggaaaaatatatggccaatcagccatgtccgacatgtaaaggatatcgtctgaaaaaagaaacgcttgcggttctgatcaatggcaaacatatcggagaaatcactgatttgtctgtctctgatgcccttgatttatatggtgaaatcgagttgtctgagaaagatttgcagattgcccagctcattttacgtgaaatcaaagaacgattgtctttcttaaataatgtgggattagattacctcacattgagccggtcagcgggcacactatccggcggagaggcgcagcggattcgtctggcgactcaaatcgggtcaaggctgacaggtgttctttatatattagatgaaccatccattggtctgcatcagcgtgacaatgaccggttgatcgggacattgaaaaacatgcgtgacatcgggaacaccctcattgtcgtagagcatgatgaggatacgatgctggccgctgattatttgattgatattggacctggagcaggagttcatggaggagaagtgatttcagctgggacgccggaagaagtcatgaaggacaagaaatctttaacaggacaatatttatcgggtgagaaatttattccgctgccgatcgaaagaagaaagcctgacggccgctacattgagatcaaaggtgcaaaagaaaacaacctgaaaaacgtcaatgcgaagtttcctctaggcgtctttacagctgtgaccggtgtgtccggctcagggaaaagtacgcttgtgaatgaaattctattaaaatcacttgcgcaaaaactgcacagagcgaaggcgaagccaggacagcacaaagagatcaaaggaatggatcacttagataaggtgattgatattgatcaatctccaatcggccgtacgccgagatccaatccagctacgtatacaggcgtatttgatgatgtgcgggatgtgtttgcacaaaccaatgaagcaaaggtacgaggctataaaaaaggcagattcagctttaacgtcaaaggcggacgctgtgaggcgtgtcgtggagatggcattattaaaatcgaaatgcactttttacctgatgtgtatgtgccttgtgaggtgtgccacgggaaacgttataaccgcgagacacttgaggtcacatataaagggaaaaacattgccgatgtccttgaaatgactgtggaggacgcactccaatttttcgagaatatcccgaaaattaagcggaaacttcaaacgatttttgatgttgggctaggatacattacacttggacagcctgcgacgacattgtccgggggagaggcgcagcgtgtgaaattagcatctgagcttcaccgccgttcaaacggaaggtctctttatattttagacgagccgacaacaggtctgcatgtggatgatattgcccgtttattaaaagtgcttcagcgtttggtcgaaaacggagatacggtgctagtgattgagcataaccttgatattatcaaggctgctgattacctcgttgatctcggaccagagggcggtgcaggcggcggaacgatcattgcctctgggactcctgagcagattgcaaaagaagaagcttcttacactggtcaatacttgaagcctattttagaacgagaccgtgaacgaatgaaacagttggtcaaagaaacagaaagtgtaacgtcatcataaaaaaaccctcgttaagaggggtttcagattgttgacaaagggctaaaatgatgtttattttagccctttgtcttcttttcagtgtgatagaaaacctttgaagtctaggaaggatgagcactggcgcggagcgaatttgacattcgggagcaccagcgcgcagtcctgacaaaaaatgcgagggtttgcctacacgctgaaacccctcgttaagaggggtttttcttttattgcgcatcttccttcggcattaaatgactgagttgcgttaaatcctttaaaatatgggtgctgctgctgtcgagcagtacttttaaataacggatatcaccatactttggatgagacggatgaatggtctcaagctccctgatcatatcgctgttcatgcttttctgtttctgtataaggtctaaaagcgtttgagccgtgtggttagtattatgatgatctgtcaaaataattaccccctataatgataatcaccatcttttcaacatattttaaagggtaatccgtgaagaatctatacttaggtgcaaaaagatataatttgtgtctaaggtcatatgtaattcgaatgattttgaaacttttgatacgcaataaacgtatgagttaaaaaggaattttcatcatgaaggagcgaatatatgaatagagatcagtcgatcattgcatctatttgttattttagtgtattttttatgccgtttattgtaccgatcgtggcatattttgtagttgatcaaaaggaaacgaaacggcacgcgatgcgggcattgtggtcacaccttttgccagtcgcagcgtgcgtgatactggtttttggatctatcccatttttattggcgacacaggcaagtgactcacttattccagtgatcacgatgctcatcttgtcctttttagtcgccattggctttttgatctctgtcatttggaatatcattcaaggtattaaagtacttcaatccatcaaatcgtaggagggctttgtatgaatgaaaaagaacgcattttaaaattagtagaagacgggacattatcggcaaaagaagcgattacgctgcttgaaaaactagaagaaagtcagtctgtttcattagaaaagtctacagctgatcacacctttcatgaagaaaaagctggcacagagagcaaaggaactggtactgaaaatcttggtgcaaagctgtttggctggttagattctgcggtgaaaaaggtgaaagacgtagatcttgatttaaactttggacagtcggtcgacgttgagcacatttttcagttcaaagacgccacgctctctcatttagatattcaattggcgaacggcagtctcaatgtgatgccttgggacgatggggatattcgtgcagagtgccatgcgaaaatctaccgtgcagaggacggagagcaggcaagacagcaatttctcaatcaattggactgcggcctggaaggggataaattttttatacggaccgaaaagaagacgatgaaagtcaatgtcactttatatgtacctcgtatccaatacgataaaatcaaggttaaactgtttaatggtccgattcgcggggaaaagctaaagacaaaagaacttgctgcgaaaaccaccaatggtgttgtctcttttgcctcgttacaggcagaaaaggtcggaattgaaacagcaaacggacaaattaaactggcggatcacgagtgtggtatgattgaagtagaaaccatcaatgggctcattgacctgcgcgggaaaagtgaatcaattgatgcccaaagctttaacggaaacattgctgttcagctgtcggatgaaaagtgccgttccatttatgcgaaaacgacaacaggcagtgtggacgtccagatcccgcgtacgtgtgcagtgaccgctgaactgaaaagcaatcttgggtctatttctcatgatttgtttgatgcagagatgattaaagagaaaaatgaaacattacaaaaagagaaaatgatcaaagccaatcaacaggcagtgaacagtatatccatttttgcagaaacaaaaacaggttcaattcaagtaaagcaccaatcagacaaggagtgattctacatgaagaagctttatcgttcagcaacagataaaaaaatagcgggtgttgttggtggacttgccgaatacttaagtgtcgatgcatccctgcttcgcattttaacggtcatcatcggatttttgacagcatttatgcctatcttcctggtctacttcatctggtattttgttgttccggaagaaggcactaactaaatgcttagatggatcgtcagtattttagtaaatgcattacttttaatcgtcattgctggatattttgattcaggcattctgccagggctcggaagcgtatatattgaagggtttggggcagccattgtcgcaagtatcattttatccttgctcaatattttagtgaagccgtttttgatcattttaacgcttccagtaaccgtcctttcactaggattgttcttgtttgtgattaatgccatcacattgatgatgacatcgagctttatgggtgatagttttaacattgatgggtttggaacggccatttggatggctgtcattttatccattttccatctgttgatacaaaaaggaattgtggagccgttagcgaaaaaaagctaacggtttttttgtaccattttgtatcgtttctccgtttcatctgtcataaaaacttccttcaggagacacaatatccgaaggaggcggtgcacgatggtgaacgtgagcagacaaatcatgcttttatgtttttttatcattcttttttgtttcaatcagcctgcttcagcagggccttttattcaaacacaagtcaatataccggacaagcctttttctccttttatctttgatcgatttcatgtggatgtccgtccagttctaggggaaaaaagccgtgatctccagtttcgtgcgtctattacggatccggaacaaattttgtctgcaaacttgtactataaacaaagtgatgaactagggtaccgtttgatcccaatggaacggttaccaggtatgaagccagaatttacagcgaaaattccgccagatcaattatggaattcaaccgttcgttactatacagagtttcttacgcaaaagtccgtgatcaaaacggcagaacaatctgtccacttaaatggatttgaagaggatctttctcgcattccggacttagtcatcacggaaattgttgtcaattcaaagaatcgcaaaggcaaagatgcctttgaatttatcgaggtgtataacacgacacatgagccaatctctcttaaacattatcaacttcgctaccgcaatcctgcacaaggaactgaaatggatgatgtgtattcctttcacgcaaatccagtcaccatttcacctggaaaaccttatgttttctggctgaggaaaaaagggcaggagcatttaagtgtagcggacttcaatgccatgtacaaaagtcaattaaaagagggagagcatgtatctgtcatcgagagcaaagggctgtccaactctaaatctcgtcttgtttcaatcacaacaaatataggggaggagatttcttcagcagcatttcgtttgaagccatcatggtttagtgagcataaatctttgctgtttaaatatccaatggacggtacttcgcaaatgaagctgatctcgaaaattgaagaagagcctacgcctggaaaagtgctaaaagcacaaattccatctgagaaaaaagaaatttctcaagatatccataaacctgtgattgaagatatgacagtgaggaaaccagtgaaaccaactgaaagcatagagattaaagcggatgtacaggatgatcaggccgtcaaaaccgtcaagcttcgctatcgaacaaatcggaaagatgatttcaaggaaatactgcttcaaaaagatcataacgaccggttatttcatcatattatttactcacccgagttgattggtaaagaacaattggaatatcagcttgaagcgtcagacggcgaaaatacagcaatgacgatgaaaaaaatgattgatgtggagcaggttagcaaagcccacggccttcgattcaatgtagaagaaggagatacggtttcaggattatttccattaaaggcaacgtctgatcggaaaaaaagcattgaattattgatagatggaaagcggaatcagcaagtattttctgcccttgaagcagatccatatatcgcatttgatgtcaaagggacaaatttatattttaaaaatggtgtgtccataggtaagcacttactttctatttttgatgattcgacaaaagtgtatcgtacctatacaatgccaataccagaagcagagatgaaaaaagcaggtccccaaacgatctccttccatgctggaacgaagtcttctccagtagatcggctgcctggagagaatcacgatgattttgaattaaaaaatgtccggatgatcctgtcgaatggaacacaaattcctccaatcaatgaaaagccgcaaaaagaatggaaaatgggagacagcggtaacgccaaaaaggtaagaatatttcaatttgaaattccaaaagaagcttatgtttcaacctatatgaagtgggacacaagaaggctgaaagaggggccacatttgattgaggccaaaacctcagacgagcatgcatctgtacatgtgaatgtcgataacacaggtccgaaaatcaagaccaacgttcaaacaaaggatccatataaaggtgcctttacgttaaaagcaaaggtaacggatcgttggagtgacatagaggagatgaaggcatatgtagatggcaagccaatttccttgccatatcagacgtcctctagcgaattaaaccctggtgagcacacattgacaattaaagcaaaagatgccgcagggaacatgtcgacgttgaaaaaagaattcaaaacggtacatgaacaccctgagacaccagaacgagtagcagataagacgaaaatgaaatcgtctaagcaaactgtgctcaccaaggatccaacgaatgataagctggattactccttttaccgtgcctaccaatatacatcgctgcatccatcaatgaagattttgaaatatgcagcggagacagaaccgccaaaaagctttaacgaaaaaggagaaatgatcttttctaatcaagaaaggaatcgcattgcatttgctgatggtaagtcagttgaaacgaaggatttacatcgttttccctatcatcgttttcaaatcaaggttcatcaagatgtacgtgaaaaggatgtcgtcgaagcgatgtggaaagggagttcattgtcagggagaaaggtgaccatgtatgcatggaatcatcagcaagaaaagtgggataaaatcactcatcattttgctaaagatcaaaaagaattttacctgaaaggactgctgtcagtaagacagtacatgaagaatcatacgtttgatttgcttgtacaggatgaaatcagcaaagcgcaaaagccatataagatggtttggatgtctgacacacaatattatgcaaagagctatcctcatatctttaaacaaatggtcgagtggatccgagaccagagggagaagttaaacattcaatatgtgttccatacaggtgacattgtggatgattcaaaggataaacaatggcatcgtgccgatacgtttatgcgtgtgttagatgagcatcagattccttacggtgttttagcaggaaatcatgatgttcgacataaggacggcttatatgcggaatatgggaaatatttcggggagaaacgctttgcaaataaaccttactatggtgaatcctatcaaaacaatcgaggtcattatgatctcatctctgccggtggcaatgattatatgatggtatacatgggctgggggattaagcaagatgaaattgattggttaaaccgtgtgatttctgagcatccagatcgcatcgtcattttaaatttccatgagtatttgttggtgagtggcaaccgcagcccgattggcgacctcatcttccatcaggtggtgaaacgccatcccaatattgtggcagtatttagcggccattatcacggagcaagcaggaaagtagatgagcttgacgatgaccaggatggcaaagtagaccggaaagtatatcaaatactcgctgattatcagtcaggacctgaaggtggacaagggtttatgaggctgataacagccgatcaagaaaaaaaccagcttcattttacgacgtactcaccttatatgaatcaagagcatttctatgatcctaaaacgtatggagatcaggatgaattttcaattgatgtggatttgacgccgaaaatgaaatctgttaaaaccaattattttgaacttaatgtctacacaaatgtcctgataggagaggcacgcggtgtaaaaagcggcaaaaaagcaagctttgagtggaaaggcttaaggccaaatgaagactattattggtacactgtagcaaaagatcgttttcaaggaaaagcaatttcgcctatatggaaaattcatacaaaagatgatcgtgaagcaacatttcttaggaaataaaaaacagtgctcctccttttatgagggcactgtttatctttccattgtatgaatgagcttgtaacgatcccctctatacacggagagaacatactcaaacggaatgtcattctgaaaataagtcgttcttgcgattgagagcacgggatcgcctgttgaaatagacagcacgtgtgcttcttcctttgaagctacattcgcttcaagctcttgttttgcatgagcaattgcaaggcctgtttgagtctctatatattcatatatagagccagttaaatgttcctttgttaaatctcctgcaaatgcttcagggatatagctcgtttcaatcgccatcggttcatcatttgcaaggcgtatccgtttgagttcaaagatagcatcgctatttgacagttgtaagacaggcagtaagtgctctggacatacggtttttttgaagtcaatcagctggcttgaagctttaagcccacgctggcgcatatcctctgtaaagcttgttaagccttgaagcggctgttcaaacttttttcggctaacaaaggtgccttttcctttttgtcgatacaaatatccttcgttcacaaggttcgataaggcttgtctgacagtcattcgacttataccaaagcgttcggcatattctctttcagaaggaatgagtgtatcaggtgctaatgttctatcctcaatctgttttttcaagttctccataatctgatggtacatcggaataggtgactgcttatcaataaacatgtgaaaatcctctcgtgtttagctttagcgtagtgaacctgcttctcgatcaattaaaatcgtcacatcttcatgaagtttcagagcagatgctgggaagtctggatgtatctcagtctgttctaaatattgtatcactttcgcttttgattttcctgatgcaagaaggacaatctttttacttgaaagaatgcttgcaatgcccatagtaatggcatgtgtaggcaccttatcaatagaagaaaagtatcttgcattggcctcccgggtgttttcatctagttgcacgacatgagtctttgagttaaatggggtaccgggctcgttaaaaccgatatgtccattttgaccgattccaagaagctgaaggtcgatgccgcctatatcttgaatgagctgatcatatcttaagcattctttttctaaatcaggtgcagcgccatttggaaggaaatactgatcctgagggagatcaatatgatcaaataaatgacgtttcatgtaggtcatataactattttcatgatctggatcaagtcctgcatattcatctaagttgactgtttttgtttgtttgaaagacaattggtgtgcttgatgaaggtgaattaactcttgatatgtatcaagaggtgtaccgcccgttgctaggccaagtactgcatctggtttagaagcgattgtgcgtgcgataagggctgctgcttcttttcctaattgttctttatcttcaaattcgatgatcttcattagtggttggcctcctttttctcaaagacgatttgtccacggcagatcgtcatcattagttcgccagattgatcccaaatcacaaggtctgcttgttttccaacttcgatagaaccgagctgctggtcaagtcctagctgaatggctgcattggttgaggtcatcttcgctatctctgtccattcacaatgtgtaatctgtttcatccgtttgacgccatctttcattctcaggatcgatcctgcaagtgtaccatctgagagtaatgctttttcgccgctgactgtgactgtttgaccgccaaattcgtacgtcccattcccgagtccttttgcgcgcatcgaatctgtaatcatgatcaaacgatcacttccttttgccaaatatgcaagcttgatggaaagtggatgggagtgaatcccatctgtaatcagctcagtatgaagattctcgttcgtaagagcagccccaacagcgtttggttcacgatgctgaaatgaactcagtgcattataaagatgcgtgacatggcgtgcaccatgattagctgctaattcaatcatgtcatgatgggcattcgtatgtccaatagaaggaatgatgtttttttcttgcaacagagaaagaaaagcaaagtcagggtcttcctcaggtgcaaacgtgacaattcgaataagctgttgagaagcatccagccatttttcaaaaagagggagatcgggctgctttatccattgaacaggctgtgcccctgctttatctttagaaataaaaggaccttcaagatggatacctaaacattgtgcctgaactcctgcttgttcttcattataatgtttccactgagcgacatttttaagtgcttgctcaatctcatgatggttttgagtgatggttgttgctaaaaaacttgtcgttccttctgacggtaagtagtcagcgagtgtattcatggcttctgatgtcgcatccatcatgtctgctccatatccgccatggatgtgaatatcaatcattccgggaagtaaataaaagttttcccgggaaatatatactttttcataatttcctgtcggtggtgatgttgaaatatagtcaatcttgccgtcgcgtaaaccgacaaaaccgtttgcaatcatttcagtctttgtcacaatatgaatattggagagcaataaagagctgctcatgattgtgccccctttagtcattgtctttgacttagtttaccctttttaagtatagttgtctataccagtgaaacagatgaaacaggatcaggataaaatactgttttgggatcatcattgaaagtgataaaatagagctgtatttctgaatcgcctgtgataaaaggaggaagaagcgtgccgaaagttcgtacgaaggacataatggaacaatttcatcttgaactggtaagtggggaagaagggattaatcgtcccattacaatcagtgatctttccagaccaggtattgaaatggctggttattttacatattacccaaaagaaagagttcaacttttagggaaaacagagctttctttttttgaacaactcccagaacgcgaacgaaagcagagaatgatgtctctttgtacagatattacccctgcaattattttgtcacgagatcgtgaagtgccgaaggaattaattgaagcttcaaatgaaaatggcgtccctgtgttacgatcaagcctaaaaacgacaagactttcgagtcggttgaccaactttttagaaagtaagcttgcaccaacgaccgccattcatggcgtgctcgtagatgtatatggtgtaggtgtattgttaattggaaaaagcggagtaggaaaaagtgaaacagccttagaactagtgaagagaggacacaggctggtcgcagatgattgcgtggaaatccgtcaagaggatcaggatacgttagtcggaagcgcaccagagctgattgaacatcttttagaaatccgtggactaggcatcattaatgtgatgaccttatttggagccggtgctgtcagaagctataagagaattacgattgtgatgaaccttgagctttgggaacaaggcaaacagtacgatcgtttaggacttgaagaagagaagatgcgaatcatcgatacagatgtaccgaagctgaccatccctgtccggccaggacgaaacttagcggtcatcattgaggtggctgcgatgaacttcaggttaaaacgcatgggacataatgcggcggaacaatttacaagtaaacttgccgatgtcattgaagacaatggccaggatgaataggagttgtctatatgaacgaagcgattcagccaattgatccgattgcttttcagctcggacctctttcggttcattggtatggtgtgatcattggggtcggagccttgctgggactctggctcgcactgagagaatgtgagaagagaggaatcaataaagatacgtttattgacttaatcttatttgcgattccaatagccattatttgtgcacgaatttattatgtatccttcgaatgggattactatcagcagcatccaaatgaaatcattaagatttggaatggcggaattgctattcacggcgggctgataggtgctgtgctgacagcgatcgtctttacaaaagtgaaaaaggtgtccttctggaaaatagccgatgtagcagcacctagtattttactagcgcaggcaattggacgctgggggaactttattaatcaggaagcgcatggtgaggctgtttcaagagcctttttagagaatttgcatctgccagagtttatcattaatcaaatgtatattgatgggacctattatcacccaacgttcttatacgaatcattatggaatcttgccggtgttgtgatcttgattttattacgcagaacatcgctgcgcagaggcgaaatcttcttgtcttatttaatctggtattcaatcggtcgtttcttcattgaagggatgagaacggacagcttgatgctgacagaacatctacgaatcgctcaaatgatttcgattgccatttttgcagtggctgttctgctgatgatctttagaagaatgaaaggatacgcatcgattccttataaagagaacaactcatcgaattaagcaggggggatcagaagagatgggagagacatggaaaagcggcttaaaggcagggctatcgacaacttggacacttggaaaagtcatctttccggttaccattctcgtcagtatcttgcagcatacgcctgttatgaattggatcatacaattcatacggccatttatggagttgtttggtctttcaggagaagcggccattccgcttgtattaggaaatgtgctgaacttgtatgcgggcatagccgccattctgacactagatcttcctgtgaaggaagtgttcattttggccgtgatgctgtccttttgccataacctgatcatcgaatcgacagtggcagcaaaggttggactcagagtgtctatcattttgctggtcagaatcagccttgctgttatttcggctattgtcattcatctcgtttggcagggaggccaggagccagcacaatatggactgctgacggcagctcagccggctgatgtgccttccagctggtacatgattgtccttctcgctttacaaaaagccgtactcggtgtggtccagctcgcctgtatcgtcatccctctcatgatcatcattcaattcatgagagatttaggatggctccatacgctgtctaagtggctgtctccatttacgagaatgcttggaatgaaagaaaatacgtcgatgacaatggtagctggattaaccatcggtctggcatacggagccggcgtgatgatgaaggcagtggaagaggacggcgtgagtaaaaaggatttaacccttgctttcattttccttgttgcctgccatgcagtggtcgaagatacgctgatatttattccacttgggattcctgtgtggccgcttcttgtcatccgtctgatatctgctattttattaacagctgccattagctatatttggcggaagcgggagcttgcagctgttagaaaggaagccatatgaacgaatcaactattaacaccgtgctatttgatttagatggcacattaatcaatacgaatgaattaattattgcttcatttcaacatacgcttgatcattattatcctggtcagtacagccgtgaagagatccttcatttcattggtccatcattgtttgatacattctctgcgatggaccctgagctaacggatgatatgattcagatgtatcgaacgtttaatcatcaacagcatgatctgcttgtgactgaatatgagactgttttagatacattgaaagtcctgcaggatcaaggatttaaacttgggatagtcacaacaaaaatacgtgatacggttttaatgggtttgaagctgacaggtttagagccattctttgaggtgattgtgacgctcgatgatgtccaaaatgagaagccgcatccagaacctgtccagctggcattatccaagcttggcagtgatccgcatgaagcggtgatggtcggcgataattatcacgatattttgtctggtcaagcggcagggacaaaaacagcaggtgttgcttggacgattaagggagaagaggcccttttaaagcatcgccctgatttcatgctgaagaaaatgagtgatctcctggcgattgttggagctgattgagttgagaaaaacagatcgttattctgtaaaaggggtcaattcgttacgacaagtctatcggacggttccctttttcaaagtggtgaaaaactttattttcattcaaatagcacggtacacgccttttatgggaatgaaaaattggatataccgaacctttcttcgtatgaaggtcggcgaggatacagcgtttgccttaatggtcatggtggatctcatgtttcctgagaaaatcacggtcggtcgaaatagtgtgattggctataacacgaccatcttgtcccatgagtatttgattaaagaatacagacttggggaagtctatattggtgatgaagtcttaattggagccaattcaaccattttacctggtgtaaccattggggatggggcgatcgtatcggctggtacacttgttcataaggatgttccagcgggctcatttgttggaggaaatccaatgcgcatgatttatacgaaagaagaaatgaaagcacgtcaatctacgtctgctgagtagctcggcagacttttttgttgacaatatgttatggtgtaactataatgattacaacagaggtgagaaaacatgaaaatcagcagcagattcactgtcgctgtccatattctggccttgctatcacttgaaaaaggatcattacagacatcggaggatatcgcgggaagtgtgaatacaaacccagtggtcatccgccgcattatgagtaaattaaaaaaagcaggcctaatctcaacgagtcttggcaaaggtggttctcagttgaaccgcagtgaagacgacatcacgctgcttgatgtgtataaagcggttgaagtcgtggatgagggagagttgtttcaaatccatgaaagcccaaatcctgactgtccgatcggtgcaaatattcaggctgtgcttgagttaatcttgtgccgcgctcaaagtgcgatggagcaagtgcttgctgagatcaaattaagtgaactaacgcatttgttaatcaaaaaaattggatgattattcaattttttttacctctgttgtaactataattgttacacctttatttattaaataaaatcattttacaggaggaattcatatgaagattggtattattggcgctacaggtaaagcaggacaggaaattgtaaaagaggctcaatctagaggacatgaagtgacagccatcgttcgagatgcacaaaaggtgacagattcatccgtagctgttatcgagaaggatgtgtttcatttacaagcagaagacatcaaaggctttgatgtcatcgtcaatgcatttggtgcacctgctggacaagagcaccttcacgtagaggctgggaaaaagcttattgatattttgaaagaggtacccgatacgcgtttaatcgttgtgggcggagcaggcagtctatttgttgatgaggctcaaacaacaagacttgttgatacaccagaatttccaaaggagtatgtggcgactgcttcacagcaaggtgaaaacctaaaagatcttcaacagaccgaaggattaaaatggactttcctcagccctgctgcattctttgacccagaaggcaaacgcacaggttcttatgtgaaagggaaagaccagctgattgtcaattctaaaggtgacagctatgtgagctatgccgactacgccattgcccttgtcgatgaaattgagcaggctgcccatgttggagaacgttttaccgttgtatctgaagcagaataagtcgtttcactgccgctaaaaacgatgagtgagaagtctaacgatcaagaattatctctcatttttactaaaaaaaggttgaatacttcattgtaggcggaggagtaatgacagctgcaaagcttgaagaccgcctgaaggaaatactagaaagatcatcatgaaaaaaacatcctctatacggctagaggatgttttttcatgttttcaatgagaaaggtgttctacgctttaatgataatcgcctgccggcccatctgttcccaagaatcctcaaactgattgcgatcgactttttgattcttttcaccgtatgggttatttaggtagacatgttccttgtcatagcccgtgatgaccacgctatgcatattaaagctcacatctattttgccatttggtgtattccatgtttcgatgttatctattttgtcaaaggtggatgtggtaattacccaaacaggataccctttttcaagtgattgatagatggcctttttgacaggttttccacttaaatcgacgacttgagcgcccgcatattttttcgcaagctgataaataggttcatggtaaacaccaagacctggtccattctccatatcgcctacaaacccgtcatgcgggtctccttttaagccattttcataattgagcggaacacgtttgatttcatttgccaatgcgtcttttgtcacttgctcatagccgctgtaatgaagaagcatcgctaagcttgtgacttcgcatccattataaagctttggggcatccatttgattgtagaggatgacgtccatggcttttttgcttccttttaaagaagaatatgtgttgtctgtttttttcgttgatcgtgtttcttcagctgcgagtgccgtatcgttttctttttctttggctgcttcgtgtggtgaagctgccttcttgacttggtcgatttgtgtcacgtatataaagccgaaataaacaaggcatgcgcacaacaaagttaagattaatgtctggatgaacttcactgtaatctcctgtgttattcaatatttttaagtattatatcacgttcttttatcaaacatgcagaaaagggacaggtgtcacttgaatgtaataattccacaaatttttcatgaaaatagagagaaaataaaaatgattgatttaattactttattttgttagcatattatcatattagcgaactaaaggattcggaattttttgttttaatgtgttggaggtgcagaagagcatgtttatgtttgagaaaccatatggtatgcgggattcattaccaggattgtatgagacgaagaaaaaagtgagacattcattaacagaggtcatgaatggctggggttatcgtttgatggagacaccaacgcttgaattttacgatacagtcggtgttcaatcggcgattacagatacacagctctttaagcttttagatcagaacgggcaaacccttgtactcagacctgatatgacgggacctattgcgagagtggcggcttcaaagcttcatgaacaggcgtatccgcttcgcgttgggtatgcggccaatgtgttccgggcgcaggaaagagaaggcggaaggccatcagaatttgagcaggtcggaattgagttgattggtgatgggtcgattagtgcagatgctgaagtgatcgcgcttgtcgtatttgcattaaaaaatgccgggctaaagtccttcaaaatcgcgatcgggcatgtcgctttagcagagacgttatttgtagatgtattgggaaatacagagcgtgcaaacgtcctccgccgattcttatatgaaaagaattatgtaggataccgccagcatgtgaagcaattgccactctcctccatcgataaaacgaggctgttacagcttttagagttaagaggcggccaggaagtcacagagcgggcaaaggaaatcgtcgtttcacaagagggaaaagaggtgctcacacagttaaaatcgctttgggaaacacttgaagattacggctgtacagaatatatccgtttagatttaagcatggtgagtcatatgagctactacacgggcattttgtttgaagtatttgcagatcatgttgggtcagtcatcggaagtggcggcagatatgaccaattgctggctcattttgatgcacctgcaccagctacaggattcggacttcgattagaccgtctgcttgaagcgcttgatgcaaaagaaatcaatgagccgcaggaggcagtgatttttagtaaagaacaacggctggaggcttttgcttttgcagaaaaggagcggtcaaaagggaaaaagatcgtcctgcaagacttagcagggattgaaaatattgacgcgatgaccaaggcatttgagcaggtgacttattttatcggcgctagaaagggagagtcaaatgggtaaagtgttgacgatggcgatgccaaagggccggatatttgaagaagcagctgggttgttaagacaggcgggatatcagctgccagaggaattcgaggattcaagaaagttaatcattgatgtaccggaagaaaacctccgctttattttagcgaagccaatggatgtgacgacttatgtagagcacggtgtagcagatgttggcattgcagggaaggatgttatgctcgaagaagctcgtgatgtgtacgaagtgctcgatttaaacatcagcaaatgccatttagcggttgccggattaccgggagccagctggggcggtgtcgcgccgcgtgtggcaacaaagtacccaaatgtcgcatcttcctattttagagaacaaggggagcaggtggagatcattaagctgaatggttcaattgaattagcaccgctcatcggactcgccgatcgtattgttgacattgtctctacaggtcaaacactcaaggaaaatggacttgttgaaacggagcatatttgtgatattacgtcacggtttattgtcaatcctgtgagctatcggatgaaggatgcggtgatcgatgaaatggcgcagcgccttgcaagaatcattgaaggggaggaaacatcatgaacatcacctacatacaagaaggtgagacagagacactctcactcaagcggactttagatacaggtacggaagagcagcgcctggctgttcagcggattatacaagaagtgaggctaaatggtgatcaagcggtacagtcttttacaaagcaatttgatggagtgctgcttgaagatccgcttgtcacagaggaggaaatgacaaaagcctccgcacgcatggacccagccatgattcaggtgattcaaacggctatccgtcatattcgcacataccatgagcgtcagctgacatcctcttggttttatcaccagcaggatggctcgatgctcggacaaaaggtgacaccgctcgatgcagtcggtgtgtatgtccccggcggaacagctgcttatccatcatctgttttaatgaatgtgattccggcgcttgtcgctggtgttgagcgaattgtccttgtgacacccccagggaaagatgggcatctttcagatgctgtactcgttgctgcaaaggagctcggtatttctgagatgtataaaatgggcggtgcgcaggcgattgcggcacttgcctatggaacagaaagcatccagtctgttgataaaatcacaggtccaggcaacatatatgtagccctggcaaagcgggaagtatttggcctggtagacattgatatgattgccggtccgagtgaaattgtggttctagcagacgatacggcatcggcacatgaggtagcggctgatttactttcgcaggcagaacatgatgcgttggcatctagtgttttggtgacaccgtctaagacacttgctgaaaacgtgcaggctgaggtgcaagcgcagctggacaccttgccaagaaaatcaatcgccgcacaatccatacaaaatcatggccgtatatacgtgacagattccatggatcgtgcagtagacgtcgtcaaccagttagcgccagagcatttagaagtgctgacagcatatccagaatcacttcttggtcaaatcaagcatgcaggggcgatttttttagggcgttatagccctgagccggtgggagattattttgcaggaccaaatcacgtgctgccaaccaacggaacagctagattctccagcccgcttggtgtgaccgattttcaaaagaaaacgagcattatttcatatagtcaagaagcctttgagacacacagggatagcattgcagcttttgccagattagaagggctcgaagcgcatgcaaggtcgattgaatcgagaaagcgggaggaatcgtcatgagacaggcggaaacagcgagacaaacaaatgaaacgaatatttcgttagcgttagagattgatggggaaggaaaagcagatattcaaacagatgtcccttttatgacacacatgcttgatttatttacgaagcatggacactttaatttgaccgtcgatgcgaaaggagatacggatgttgatgatcaccacacaacagaagatatcggcatcgtgcttgggcaaatgtttaaggaagcgttaggtgataaaaagggaattaagcggtatggctccagctttgttccgatggatgaaacgcttgcccaggtcgtggtcgacttaagcaatcgccctcatttggaaatgagagcggcctttccaagtcaaaaggtcggtacctttgatacagagctcgtgcatgagtttctttggaagtttgcgctagaagctcgtataaatcttcatgtgattgttcactacggaaccaatacgcaccatatgattgaagccatttttaaagcgatggcacgtgccctagatgaggcaacaaccattgatccacgtgtgaaagggattccttcgacaaaggggatgctctaatgatcggagtcattgattacggaatgggaaatttgttcagcgtatcaaaagcactggaacgagcaggtgccagttatatcgtctcctctgatgtggaggagctcaaaaaggcagatgcttatattttgcctggggtcggttcgtttcgtgatgcgatgcagctgttaaaacagacaggacttgaagagtttatccaccaagttgtgcaggaaggaaagctgctatttggtatttgtctcgggatgcagctgttatttgaagaaagtgaagaggtaggacgtacgaaaggtttggggctgttaaaagggcgtgtcgttcttttaaaggatcgcgaccaggatgggcaaaggctgaaggtgcctcatatggggtggaatgagctcacatttcatcagccctccccattgtttgatggtgtaccggaaggatttgcgtactttgttcactcttattatgtaagtgatatgaatccaaaagagcaattagcaagtgcggattatggcgttcaagtaccagcagttgtcggcaaggggaatgtgcttggcgcacagtttcaccctgaaaaaagcagtacaacgggaatggcgctgctcaaacaatttattcaattagcaaacgaacagagggtgaacaaatgagtgaatttacattgtatccagcgattgatatgagaaatggcaaatgtgtacggcttgtgcaaggagattatgatcaagaaaccatttatggagattcgccgcttgatatggctgcgcggtttgcaaatgaaggagcaaagtggattcatctcgttgacctagatggtgcgaaagcagggaatcgcgtcaatcatgagcatgtactggcgattgcttcatccttagatgtgaatgtacaaattggcggcggtattcggactgaagaagacgttgccttttatataaacaatggtgtagctagagtcatccttggcagctccgctgtttctaatcccgcctttgtgaaaaaaatgcttgcgcaatatggggagaaaatagcgattgggatcgatgcgcgaaatggctttgtatcgactgaggggtggcttgaaacgtcgaaagtgaaggcggaggaactcggcaaagaattggcaaaggaaggcgcggaggtctttattttcacggatattcaaatggatggcatgctgtctggccccaatgtggaaagtacagttcgcttagcggaagctaccggcaaacaagtcattgcttcaggtggtgtaagcgcgctagctgatcttcaaaagctgtcagcacaaaaacagtcaggtgtttctggtgcgatcattggaaaggccctttacacgaagcggtttactttagctgaagcaattgaagggcttgaccgcgtatgatgacaaaacgaatcattccatgtctcgatgtgaaggaagggcgtgtggtcaaaggggtgcaattcctcggcttaaaggatgctggtgatccggtagaattagcgcagatgtatgatgaggaaggggcggatgaactcgtctttcttgatatttctgcctctcatgaaggccggaaaacgatggtggatgtggtcaagcaagtggcgtccactcttgccatcccttttacggtaggcggcgggattaaccaccttgatgacatgaagcgcatattaagagcgggtgcagacaaagtatctgtgaacacagcggcagtgttaagaccagaactgatttcagaaggcgccgatttctttggttcccagtgcatcgtcgtcgcaatagatgcaaagtacgatgaagagaaaaaagagtacatggtctacacacacggagggcgccgtcaaacggatatagaggtcagcgattgggcaaaagaagccgtgctgaggggagcaggagagattttactgacaagtatggatgccgacggtgagaaaacaggctttgatcatcgattaacaaagcttgtgtcagaagccgtcaccgtgcctgtcattgcctcgggaggcgctggcaatgcccagcatatgctggaggcatttacaaaaggagaagctgatgcagcattagcagcctccattttccattataaagagacttcaattcaagaggtaaaaacatacttgagagaacacggggtgaaggtcagatgaaacaggcaaacgaattatcctttaatgaggcaggcctgatacctgcaattgtacaggatgctcaaagtaaggaagtattgacattggcgtatatgaatcaagaatcctatgaaaaaacactggagacaggggaaacatggttttacagccggtcgagaaacgagctttggcacaaaggcgccacatctggacatactcagcgagtcacatccattcgatatgactgtgacaaagatgctctgcttgttcttgtcacaccaagtggaccagcctgccatactggcagctatagctgcttttcggaagaaggcgtgaagcttcaaacggaagagcaggatcgttttgcgattttaaatgaacttgaacaggtgattgcaaaacgtcagacagaaatgccagaaggcgcttatacaacctatctatttgaaaaaggggtcgataaaatcctaaaaaaggtaggggaagaagcatcagaggtcatcattgcagcgaaaaaccgggatcaagaagaattgaaatgggaaacagccgatctcctgtatcatctgcttgtgttattacgtgaacagcaattgccgcttgatgaggtattaaaagtattaaaaaagcgtcatcaaggtgagtgaaaagccgggggcacctctggctttttgtttttgagtgaaaaacaaatccttccttttcttttgttctatgtgacgactcgtgaagtatgttatactacacacggtacactgttcgaaatggagggtatcggtgagtaaatacacttctcaaaataatcacacacaagtcgtccagctattccaagatgggcattacttttttcataaaggtctaaaagcttatagagaaagaaatctatctaaagcgagtaagctgatacagcgggctatcgtacttgagcctgaaaatgtagaaatgctatcacagcttgccattatttatactgaaatgggtcattaccaacaatcaaatgaactgcttgatttcatacttgaacatatcgatgaaaacatgtctgagtgtcactattttaaagccaataattatgcgaatctaggactctttcaagaggcatataagtcagctactgcctatgcttcattggaagagaacggggaatttgcagatgaaaatgacgatctcctcgacctgctcgatatgagcgacgaagaggacgaagattttccttacgatcaggatgacctgattgtcaagcaggatcaagcgaatcacttgctagaaagcggcaggcttgatgaagccattgaaatgctggaacagatgattgttgagtatccagaattttggtcagcgtataataatctcgctttggcctatttttattctggtcaaatccatcaggcgaaagagatgttgaaccgggttcttcatgaaaatccgggtaatctgcatgccctttgcaaccagcttgtcttctatcattatgaaaaagaagaagaaaaggtcaatacgttagcgaagcaattaacgcacgtgtatccaatattaagtgaacagcgttataagcttggcgcaacatttgccctagttggagaatttgaatgggcctttaaatggctttattctttgtacaaaacaggctttcagggagatagtacatttttatactggctcgcaagcgcagcttattatacaggccacaaaacgcttgcacaaacggtttggaataagatggtcgaagaagatatcgatgcagatgaaatcaagccgtggcaggataaacccgaggagactgagccaatggtctccattgaggagcggctgactgcgtactatgtgagcaaacaaaaaggggaacgtgacgttcttcaatctgtccttgatgcacacgcagcgaaaacagccttcgaacagcaattcatcgaactgctcttatacgaagatgaaatggaagaacggtcgttttcagaagatgcggttttcgcaaaacaggcggcattcagcttggaagaagcagttcagcctgacagccatatgccttatttttggttattccatattattcagcaggcacgtgcttctggcgtagataagaaaaatgcgcctgcatgggcagcagcatcttattatttatggatgaaggagcaagaagaatcagctgtgagcaaaaaagagattgcagcctcttttcagatcagcgttcaaacactgtctaaatatgaacaagtcatttgtacgttaattgattaaataggtaaatagattcagcagattgcagcatggccgaaaaggtcatgcttttttcttggataaaaaggtgggatttgcaaggatttggcgaagtatgacaatcacgacatgtttttgaaacataaatgtaataaaaatattagctcattttgtcgatgtctcatgtataatgaaaatcgtggattaaaacaaagacatatatttagatattttactatacataatgaaacacctagtgatagaaacaatctggtcaacatctgactgatcaatcaggaagaaagacatagatagcacagattgaccgcagagaatttgctgctttctcatgtcgcttggaaattgtcaaaggaggaactattcgtgaaaaagtttattactttcggtttagcttcggtcatcggagcgagcagtttatttatcccatttactcatgaagcaaacgcacagaactttgaacaaaagaaacaagagctggacagcaagcaatctgaggtcaacaaaaaccttcaaaagaaaaaagatgagctttcaaaacttgaagcaaaacaagaggcacttgcactaaagctaaaagaaattgacgagaaagctttaaaaacaagtgatcaaatcgaagaaaaacaaaaagaaaatgaaaaaacaaaaaaagaaatcaaagcactgaaacaagaaattgctgatactgaaaaacgtattgaagatagaaacaagttcttgaaaaagcgtgtacgtgcgcttcaagaaagcggcggttctacgaaatacatagatgtattactaggagcgaaaagctttagcgatttcatcagccgtgcaggtgcagtatctacactcatcaacgcagacagcgaaatcattaaagagcaagaaaaagacaaagctgagcttcaaaagtctgaaaacgaattaaacacaaagcttgaagatgttcaaaagacacttgcaaagcttgaaacgcttcaaacagacttgaataaacagcttgatgaaaaagacaagctattcaagcaagtgaaaaagcaaaagggaagtgcatcttctgaaatcagcgagttaaacagtgaggctaacagcattgcatctgaaaaagacgcaacaatcgctgctcaaaaacaagctgaaaaagaagcgagagaagcagctcaaaaagcaaaagaagaaaaagcacaaagacaacagcagcgtcaagcgagtgtgcaagcggaagacaacagctcaactaacgacagcagcccgtcttcaaataacagtaacagtggatcttcaaataataataacaacagcagttcaccaagcaagaagccatcttctggcggtggatcacctgtcagcagtaacgtaggcggaatcgaaggggcaatcagcacaggttctaccatcgttggacaatctccgtataaatggggcggcggcagatcacaagccgatattgatgcacgtcgttttgactgttcttcattcgttcgctgggcattcgcatcagcaggcatcaaccttggaccagttggcggtacaacaacagatacgcttgtaggtaaaggaagagctgtaagtgcatctgacatgaaacgcggagaccttgtgttctttgatacgtataaagtaaatggacacgttggtatttacttaggaaacggtacattcttgaacgataacagctctcgcggtgtttcagttgactctatgagcaatgtttactggaaaaaagcattcaatggcgttgtgagaagagtcgttgaataaatcgttacttactatataaccgtaaacaggcttccttaaacagcagtttaaggaagctttttctttttttgaagatatgagcaaatgattcgcttattatccgcagatttaataggatatgggtaaggaataaaagtaagagtggaattgatgctctctgtcatgaatggaagcatcacccaagggcattctaataagaaatgctagcagcaattgaagagggagtgacagttgtgtcagaagaaaaaatctacgatacgatcatcattggagcgggacctgccggaatgacagccgctgtttatacatcacggggaaatctttcaacattgatgattgaaagagggattccaggcggtcaaatggcaaatacggaagatgtcgagaactatcctggctttgaaagcattttagggccagaactttcaaataaaatgtttgagcatgcgaagaaattcggtgctgagtatgcatatggcgatatcaaagaaatcgtagacggtgaagagtacaaaatcgtcaaagccggttcaaaagaatacaaaggacgctctgtcattattgcggcaggtgctgaatacaaaaaaatcggtgcaccaggtgaaaaagaacttggcggccggggcgtctcttactgtgcagtatgtgacggtgctttctttaaaaacaaagagctcgtggtcattggcggcggagactctgcggtagaagagggtgtatacctcacacgctttgcgtcaaaagtaacgatcgttcatagacgcgataaacttcgtgcacaaagcattttacaagcgcgtgcttttgataatgaaaaaatcgacttcatgtggaacaaaaccgttaaacaaattaatgaagaaaacggtaaagtcggcagtgtgaccttgattgatacggtgactggtgaagaagaagactttaaaacagacggcgtctttatctatatcgggatgctcccactatctaaaccatttgaaaatctcggcattacaaatgaagaaggatatatcgagacaaacgaaagaatggaaacaagagtggaaggcattttcgccgctggtgacattcgtgaaaaaacactacgtcaaattgtgacagcaacaggtgacggaagtattgccgcacaaagcgcacagcattatgtagaagagcttgctgaaaagctgaaagcagcgaaataaatggctgtcgtaaatccttaatatagcgtcatgggcttttaactggaatgtaacacgggtgaaataattatccgttatgataaaactagtaattgacccccttttataaggaatacatgtttggcacggatgagaatccgtgtccttttttttgcttaaaatcagaaattcatgagatgttcacaaatgacgcatggagaaccattagatgctgtaaaataaagagtagagaaattgcccgccacctctttcagacgaaatccggtctgttttcggtgaagaaagggcatgttcattgtgggagtcaggatgaacctgtataataagttaaagacataaaagagtaggtgacagctgatgcaacgagtaaccaattgtgtgctgcatcacgaagatcaagttctcttgctgcaaaagccaagacggggctggtgggtagcgccgggcggcaaaatggaaagcggagaatcggtcaaggattcagtcgttcgagagtatagagaagaaacaggaatttatattttaaatcctcagttaaaaggtgtttttacctttatcataaaagaaggcgatcaaatcgttcaagagtggatgatgttcacctttatggcagattcatttactggaaaaaacgtgacagagtcagaggaaggcattttaaagtggcatgaagtaaaagatgtgcctcatttaccgatggctccaggagattcccatattcttgatttcatgctaaagggaaaaggacttctgcacggtacttttacgtatacacctgattttgaattgattgcttatcggttagatcctcaaggagactaatacatgaaccgttttcataaagaaggagaggaagcaggcatgaatacgaacaaacaagaagatattcagcttgtgattattacaggaatgtcaggtgcggggaaaactgttgccattcaaagctttgaagacttaggttacttctgtgtagataacttgccgccatcacttttaccgaagttcctagagctcatgaaggaatcgaattctaagatgagcaaggtcgcccttgtgatggatttacgcggacgagaattctttgacagcttaattgcagctttagatgaaatgagtgatcttggctggatcacaccaagaatattatttctagattcaaacgataaggtgcttgtctcaagatacaaagaaacgagacgttcgcatccccttgcgacaacaggtttgcccctcgaaggaatcgcaatggaacgcgacctgttagaagagttaaaaggccgggctcaaatgatttttgatacatcggatttaaaaccaaaacagcttcgagaaaaaattgtcgcgcactttgccacgaaccaagggcaggtgtttacagtgaatgtgatgtccttcggttttaaatacggtctgccgattgatgctgatcttgtatttgatgtgagatttctgccgaatccttactatattgagagcatgcgtccacagactggaaacgatgaagaagtgcgctcttatgtaatgaaatggagcgagacacaaaaattcacagagaaattaattgaccttctcagctttatgcttccgtcctataaacgagaaggaaaaagtcagcttgtgatcgctattggctgtacaggcggacagcaccgatcagtgacgctagctaactacttatcggagtattttaaaaatgactactacactcatgtcactcaccgggacattgaaaagagaagcagaaaatagatgacgacacttccaaaggtggtcattcttggtgggggcactggcttatctgttttgctcagagggctaaaaacaaagccagtggacattaccgctattgtaacggttgctgatgacggaggcagctcaggcagactgcggcatgatttgaatattccgcctccaggcgatattcgaaatgtccttgcagctctctctgatgttgaaccgcttgtagaagacttatttcagcaccgttttaacaaagggaatgacttaacaggccactctcttggcaacctcattcttgcggccatgacaaatataaccggtgatttttttcatgccgtcacagaaatgagcaaggtcttaaatgtgagaggaaaagtcttgccagcagcgaattcaagtgttgtacttcatgctgaattagaaaacgggcaagtggtgacaggagaatcaaaaatcccaacctacggtgagcgaattaaacgagtgttcctcacacccgatacgattgaaccgctcccagaatcgattcaagtcattcgtgaagctgatttgatcgtgattgggccaggcagcttgtatacgagtatcctgccaaacttgcttgtaccgcatattggcgaagaagtgattcgctcgaaggcgaaaaaagtgtatatttgcaatgtcatgacgcagccaggggaaacgctttcctacagtgcagctgatcatgtgcaggcattaaatgatcatatggttcgtccatttatcgataccatttttgtgaacaataaagaaattccagaagagatcaaagcaaaatatgcagaagaacaggcacagcctgtacagttcgacacagatgtactcaaggcaatgggactggaagtcatccctggggaaatcattacatatgaccagcatgtgattcgtcacgacacgctgaaagtagcctcgctgcttgtcgacctgctgcataagaaaaaataggaatgggggtggcaaggatgtcatttgcatccgaaacaaaaaaagagctgactaatctggacgtgaaggactgctgcacaaaagcagagctttctgccctcatccgtatgaacggttcattatctttctctaatcgaaaattaattctagatatacagacagagaacgcagccatcgcaagacggatttatacgctgctgaaaaagaaatatgatgtcacagtcgagctgctcgttcgtaagaaaatgagattaaaaaagaataatgtgtatattgtcagactggtagaacgagcgaaaaccattttagaggatttgaaaatattaggtgagcaatttgtatttgagcgcaatatttcagaagagcttgtaaagaaaagatgctgcaagcgctcctatatgagaggtgcttttttagcaggcggttctgtgaataatccagaaacgtcttcctatcaccttgagattttttcactatataaagaacacaatgatgccctttgtgagctgatgaatcaatttcaactcaacagtaaaacacttgagcgtaaaaaaggatacatcacgtatatgaaagaagccgaaaaaattaccgaattcttaagcgttgtaggtgcgcataattcacttcttcgcttcgaagacgttcggatcgtccgtgatatgcgaaattccgtgaaccggctcgtcaattgtgaaacagcaaacttaaataaaacgattggtgcatcactgcgccaggtcgagaacattcaattcattgatgaaaaaattggacttgatgccctgccggataagctgcgtgaaattgcaaaactgcgagtcgactatcaagaggtcacgctaaaggaactgggagaaatggtggaaagcggcaagatcagcaaatcaggcattaaccaccgcttaagaaagctagatcaaattgcagaacaattacgaaacggacaagctgttacactcaaataggagaatgaaaaagggaggcagatcatatggtggaaaaaacggtcaccatccagttaaaaacaggcttgcaggcacgtcccgctgctttgttcgtacaagaagccaatcgctttggggctgaaatttttctagagaaggacggaaaaaaagtcaatgcgaagagcattatgggtctcatgagccttgcgatcagctctggggtcactgtcacactgatagcagatggtgcggatgaacaagaagccattgatgcgttaacggattttatcaatcaagaaaactgagtctcttcacagactcagtttttttagaagggaatgaatatgatgcaatcagcatttttacagaagatcggatacgaaggccagtccatcacctttgatgacctgcctgtattattaaaaaagatggcctacacctttccatttgaaaatagatctgtgctgaacaaacaatcctatgccttgaatcaagaggggttgaagcagcatcttcttgaaggagaaagaggaggtctttgctacgatctcaatcctctcttatattatgtgttaaaagaggcagggcttgctgtacagctcgttcaagggaccgtgtataacaaagaagcgtgcacatgggcaattgatggcacgcacgtagccatgacgttgaaccatcacaacgaacgcttccttattgatgcgggatttggtgtgaatttacctcttcagcctgtaccttttacagaagaatgggtggaaggagcgtctattcggtttcgagtcaaagaagaggaaaccgaaaaaggaacgcatctgctccaattagataagggggaaggcgctgaaacaggctatgctttcacattggaagaggtgagcgagcctactttggtccaaatgagacatgagatttatgaaaatgaagcctctccttttaacaaaagaccgcttgcgtcaaagctcacaccaacaggacgtgtagtcgtcaccgaggatcatgtcaccacacatgaacatgaagaagtgtcgaaaaaaccgctgccactgccttttgaggaatacgtgaaaactcttttgccgtaagcagcatcaaaaaaacagccctaggtcaaatggggctgtttttttgattgattatcgaatacgtgtgaaagttgcataatggtctgttgttttgtaaatgagccagtcacttgaatacacgaggcggtcagcatttcggaagccagagacgtagttgatatctgcctcacgccatgttcggccgcttgctgaaggaagacgtccctcccggttagagaaaacatctccaccgatgcttttacctggggcaacctctgctagatttccctttgatgccacccatccaagagcacttgcttgtgattttgtgatgtagttatcaggcagtcgtttgtagcgaattaaataatctgctacaccatcaaacgtattaatgacggcaagggtatgaacatctgatgtaagttgaatagtagctgtttcatttgtggcggtctgtgtaagaggtgtttcggcataggcttgctgcggaataaaaccagaaaacagaatagcagcgatcagagcaaacatagtaaaaaccgaactgatttttttcatcttcatcctcctattaaggaaatcggatgctgtcctcttgatgcttgtctacctcatattatagcacccgaacatgaaggaaatgtaaagaaacaggttctttgctaaaatgaggcttttttcctgataaccttctgatgaaataaataaaaagacgcagctccgaatcctgcgtcttttccgattaagatgaagcaagctccttcacaatatcaacaggggctttgccatcaattccatgaatcacattatgaatggctcgtttcagcataagatcccgtgttgtttcagtagcagaaccgatgtgaggagcaagggtgacattgttcatttctttgaaaggatgattctcctgaagcggttcctgctcaaacacatcaagacctgcgcctttgatccatccctcctgaagcgcttgaatgaggcttttttcatccactgttttcccgcgtgagatgtttacaaataaagccgtttgcttcattaacttcaattcccgttctccaatcatatgatacgtttcattggtcagcggtgtaatcaacacaatgatatcggcttgctttagcaggtcatcaagtgtgcaatataaagcgccatatgctgattcagccttttcattccggctgcggttatgatacaggacgttcatatcaaaaccatgtgcggctcgtttggctacttgctctccgattcgtcccatgccaataatgccaagcgtttgatgatggacatcgatgccaaagatatcttcttcctgtacaaatttcgtccatttcccctcgcggataaaacgatcaagctcggcaattcttcgcgcagaggaaagaatgagtgaaaatgcaaggtcagcaacagtatgatcgagtgtatgaggcgtgtgtgtaccaattacgcctctttgcctcatcaattctatatcgaaattgtcatagccaacagagttattgctcactactttgagttttggtgcgtgatctaatagctcttgatcgattttcgttccagacgttaaaagaccatcagcatgctgcagtttttgaaataaagtatcttttggaatggggtctttggattgccacacctcgtatgtacaatgttcctttagtatttcctcaaatgaagcaggtaatggtttggcgacaaaaatgtgtggtttcactgtcaactcgctcctttcacatgatcatcttactccttttattataaagcaaccatttcggctgaacacgtttgaaggttatctgctcaatatttaatatactaaaataacggaaaagagagacattttcttagtgaaaaagtatattcatatgccatctgatccattttttacatcgataagagtcagctaatgggtgatgtgacatatgaaaaagcctgattttctgagagattatctgacaaactggaaaatagatcgagattttttgatagaaaaatgattatatttgaaacgtattaaacgggaaggtcgttttctactaaaccatttcatcgtcttttggcgatctgagaacgatagattgaaaggaagaccgcgtctcccttacgttgaagcggaaaatagagaaaatgatgactttttttctcatcgttttctcatttttttcttttttttctatcatttttcttctctatgcttgagaacacacgaaagaaaagggggacaggcagggacttacgtgacttataaaaagatgggagatggcaagatgggatcagaattagaacagattcttcagcacaattcagagttcgtacaagagagacattatgagccttacaaagcggggaaatttcccgaaaagaaactggtcatattaacttgtatggatacacgtcttttggaattattgccgcaatccatggggctgcgcaacggtgatgccaagatcattaaaaatgcgggcgccattgtaactcatccgttcggcagtgtgatgaggagtattctactagccatctatgagctaaaggcagaagaggtatgcattgtaggacatcatgaatgcggaatggcaggtcttgcggcagatcctttacttgaaaaggcgaaagcacgcggcattgaagagaaatgtttgagcattgtgaaaaactcaggagttgatttaaagggatggctgacaggctttgattcggttgaagagagcgtgtcccgaagtgtgaaattggtcaaagagcatccattgatgccaagtgatgtggctgttcatggactagtcattcatccagcaacgggaaagctggatgttgttgtgaaagataaacagattgacgcgcagtatacctaaatcatctacacatacttgaaggaggccaacacataccatgcgtttttatggaagatttgaaggatatgattcatcaaagtttagacgcgatttaatcgctgggcttgtcgtgggcgttgtggcaattcctttaggcatggcttttgccattgcatctggtgtcggaccagaatatggattatacacagtcatcgttgccggcattttgatttcattgtttggtggttcaaagtatcagatcggcgggccgactggggcgtttgttccgattttatttggtatcgtcagccagtacggtattgaaaacttgctcattgccggttttatggcaggctgtatgcttgtattattcggaatattcaaactaggaaagctcatgaaatttattcctcgtccggttatcatcggctttactgctggcattgctgtcattattttttcagggcagattgccaacttcctcgggttaaagggtgttgaaaagcatgaaagctttttcctcaatatgagagaaattgtggtccatctcggtaccgcaaacagtctttccatcatcacagccgttattgggctcatcgtgattgtggcggctcaaaaatacattcccaaaatacctggtgctctattaggtctattggcttcaacgtttctagctgttctctttttccaaggacaagttgaaacgattggctcggcatatggggaaattcctcgtcagctgccaagcttcgcttttcctgaattaacgattgaaaaaatgatatacctcctgcctccagcgattgtcattgcacttttaggcggagtggagtcaatcttgtcagctatggttgctgataatatgaaaggctcaaagcatgacagcaataaggagcttgtcggacaagggatcgccaatatggcggcaccgctgttcggaggaattccggcgactggggcgattgcccgtacggcaacaaacatcaaaaatggcggagcaagcccgatttctggtgtggtacatggcgtcgtcgtgctgctcatcttaatgctatttgcgccatatgcgtcgatgattccacttgctgcgatggcaccgattttaatgtttgttgcttggaatatgagtgagaaaaaagagtttatcaatattgtaaaagtgaaaaatgcggattcacttgtacttgttgtgaccttcctgctgacggtcatcggtgatttgattattggcgtcaccgcaggtctcattttagcatttatcgcttttatcaaaaaaatgagccagacgaccagcattcatactaatgttgcggttccccaaatgcaaacggcagctgctttagaaaaacagacagaccagcgaggtatcagtatgtactccattgaagggccgctgtttttcggaacaacagattcattggaaaattcgattttggaccatgttcagacaaagccgaaaacgctcattctgctcatgaataaagtcaattatatggacacatcagcagaagcggttctgatgaatatctccaatcgtttaaagcatcataatggaaagctgatgattgtcggacttcaatcacagcctaaagagcttttgcgtcgaacgggtctttttcatcatattggaaagcagcatttctttgaacgaacagatgatatctcgccacagcagttataaggtggaaaaaaagcacgtgccaatgtggtcacgtgcttttcacttgctctatttcttttgaaaaacgctttgtgagtttctgttgatgagaggagaagacctcttctactgtgacatcatagagattggctaaaataagtagattcgctaacacatcacccatttcttcaacgagttctttcttcaactcggatgatttttgtctttgctcatcaggccggtcacgtccgatctctattgctctaacagcacgagcgagttctcccgtttcttccatgaggaagcctaaccggataaacggcccgtattttgtccaatttctcatttcataaaaatccttgatccacttctccatctccgttgtttgcattttctttatacagctccttatatggtgtttgccttttgattttacactatatatagatggatcggctgtttttttacaattaattatagtagaatgagtgggagaagaaatcatagagagagatggagctgttctgatgaaaacgatttgtgtgtttgctggttcgaatccaggcgtgaaggacgtctacaaacaaaaggctgtagagctggggacttatatggcagagcaagacatccgtcttgtatacggcggttcacgaattggattaatgggtgccattgcagatgaggttttaagacaaggcgggcaagtgattggggtcatgcctaaggggctttttagaggagaagttgtgcatcaagagctgacagaattaatcgaggtaacaggaatgcatgaacgaaaagcgaaaatgagcgagctggctgatggatttattgcgatgccaggcggctttggtacatatgaagaattatttgaggtgctatgctgggcacaaatcggcatccaccaaaagccaatcggcttgtatcaagtgaatgagtatttcaatccgctcattgacatggtgaagtttagtgtacaggaaggtttttcaaatgaatcacaccttcaattgttacatgcttccagcgaaccggaggaattaatcacgcagatggcttcttatcaaacaccatctcttcagcagaaatggacagagttgtcttaaagcgtttttgaatcacaaaaaaccgtctgttcaaggagcagacggtttgttttgtcatattatttttgttcttctgaattacgggtcaagactttgtcaataagtccgtattcaagtgcttcttccgctgttttgaagttgtcacgatctgtatcgcgctcaatcacttcaattggctgaccagtacgttcagcaagtacttggttcagtttatcgcgtaaagaaaggattcgttttgccgcaatttcaatttctgttgcttgaccttgggcaccacctagtggttggtgaatcatgacttcactgtttggaagggcataacgcttacctttttcaccagcagcaagcaggaacgcacccatagatgcagccataccaatacaaatggttgatacctttggtttaataaattgcatcgtatcgtaaatggccataccagctgtgatcgaaccgccagggctgttaatgtagatagaaatatctttttctggatcttcagcttctaagaaaagcagctgtgacacgatggagttggcaacattgtcatcgatcgcagaaccaagcatgataatacggtcttttaaaagacgagaataaatgtcgtaagctctttccccacgatttgtttgctcaatgactgtaggtattaaattcataatgttcctccttcaccttttaggtaagtatgtaattcaatgatacatttttggtcaataaaggtcaaacaaaacgctgacctaaattcaaatacccctatccattttccccaaactcattccacttcaaaccatcatattagtctatgtatccaaaagaagaaaatacatgttcaggactgatgattaatcattgctttcttgcagcatttcccttataatttgatatgctgacgttcaaaaacatatcgtgcgctcgtagctcagttggatagagcggtggtttccggtaccacgtctgccgggggttcgaatccctccgagcgcgtacttgatcttgttcacgatcgataaaggtccaatgaaaccctctcctttgagagggttttttcgtttacacatatatattattcacttttaaaatttttcatttatgactagccatttatgctataattaataatcattctcaattaaaggtggtttcacaagtgaaaaaaatgatttggctggtcagtctgctggcattattattagtggcatgcgggcagaaagagaataaagagcaagcagcaagtacacgtacatatacaactgaaacgggtgaaaagatcaccattcccgccaagccgaagcgtgttgttgtgttaacagcgcagcttggaaactttaaaaagttaggtgtgacacctgttggcatgacagatgtttacccagaatcgtcgtttttagatgaatcaggtgtgaagcgggtaccgatcgaaaatgtagaggcgattgccaagctaaagcctgatttgatcattgcatattcccaaaacgaacagattgaaaagtataaaaagattgccaaaacgatcacgtttacgacaagtgaacacagcttcaaagagatgcatattgaaatcggaaagattcttggaaaagaagcgttagcgaaaaaacaaatacaagaaatggacgagcagctgaagaaagacggcaaagaggtcaaagcaaaaattggtgatgacaagacgttctccattatggacgtgcagccaaagcaagtatacttatttggtacagactttggccgcggcggggaagtcatctatcaaggctatgggttcagcttgcctgaaaaggcagaaaaagctcttccgaaagaaggctatcttggtatttcattagaagagatgaaccagtatacaggtgactatttacttgtacccacaaaggatggaaaagcaccgaatcttgatatcacaaacagcggtgtatggaagaaaaatcaagcagtgaaacaaggacatgtcctgtactattcaattaatgaatttatctatgcggatccaatctcaattgaaaaacagtctgctgcgtttaaacaaatgctgctcaaaaaataatagaaaaaagacaaagcacataacatggggctttgtcttttttcttcttgtcatctcttaaaatactggtcataagactcatttcttccctttacaggcgtatttgttgagcctgctggctgtatatgattaacatggaagagaattgacaatgaggagggatttcttgtggcgaagattttattgattacatttccagctgaagggcatgtgaaccctatgttagggatcatcaaagcatgggcggatcgaggagatgaagtacatgcggtcacaactgtacattatgagcagcgaatcaaacgcttaggagctcacgtacataaacatccagactatattcgtacattacatgtggatgaaggaaatctcgattccatgcagccgttctttcatgccatgctgcaaacatcatttgatattttagaggtggtggaaacactttctcagcagcattcatttgattttgtctattttgatatgtttggggcaggagagcttgttcgagattacttacaaattccagggatcggctcaaacccatcttttgtgctgcaagaggcgcattttgatacaccgctatacagaaaggatgagaaagccgatcatctgttagaaaacatacaagagcgttttggcgttctgccaacgcgtttgatgcaattcatgaaaaaccgcggagagctcaatatcgtgtatacaagtgaatattttcagccgtctgtcgatgcagtgaacgactcgtttgttttcattggaccgagctttctaaaaagggcagatcagcatgatttcccgctggaagcacttgagcaagaaaaagtcgtctttatttcgatgggcaccgtacttggggatacagaagcattttttaatatgtgtattgatgcctttgccgactttgacggaaaagtggtgctcgcaacaggtgaaaaagtggatcggtctctcttgaaagaggcgccttctcattttctgatagaaccttatgtaccgcagcttgaagtgcttgagctgacagatgtgtttgtgacccatggcggaatgaacagtgtcaatgaaggcattcattatcacgttccgatggtcgtcattccggtcgacaaagatcagccgatggtcgcacaaagactgacagagctatctgctgcccgtgcacttgataaagatcagctgacagcaaagcagctaagagaaacggtggaatctgttctgggaagtgacacgtaccgtgctgggattgaaaaaattgaagaaagcttccaaacagcaggtggaacagaaaaagcattgcgggtgatcgatcaattgttgcaaacgaaacagactcaatcgtgagtctgtttttttgataaaaaaagagattgtattccccatttctgtatgatattattcaattcgtaatcatttcgattaataatcgtaatgattacgataatataaatttgggggaagtacatatgagtgatcagcctgtttacataaagaaaaagcaatcctatgtaacatacaccttgatgctgttttcagtcatggcatgttttttattggcatcatgctctgataataaagcatcttccagcatgaatgacagagaagaagatgaactggtgtatgcaagtacaaaagatataagggacatcaatccccatttatatggtggagagatggccgctcaaaatatggtgtttgaatcgcttgtcgtcaatacagagaaaggcgttcagcctgccttagcgaagagctgggatatttcaaaagatggaaggacctacacctttcaccttcgaaaaggcgtgactttttcagatggcgagccttttaatgcaaaggcagtgaaaatgaacatggacgctgtcgttaaaaatattgaaaagaacgcttggcttaatctcgtatccgaaatcaaatccacaaaggcggtggatgacgatacatttgttcttacgttaaaagagccttattaccctacgttagaagaactgggcttaacacgccccttccgttttatttctccaaaaagcttcattgatggaacgacagcaaaaggagttcaaagctatgcaggcacaggtccttatgtgctaaaggaacataaaaaaaatcaatatgccgtttttaaagcgaatgaccactactgggggaaaaagccaaacatttcaacagtaaagtggaaagtcatgccggatcaccaaacgattttacttgccctgcaaaaaggagagattgatctcttatttggagcagatggcgacatgatcgacggagactcattccaggctttaaaggaagcaggtcaatacggtgtgaccgtgagtcctcctgttggttcaagatcgatcgtcatcaattcaaaccagccaatgacaaaagatccgaaagtcagagaagcgtttcaatatgccattcaaaaagagatgatcacaaaaggcattttaaatggaacggaacaggtggcacatacgctgcttgccccgtccgttccttacgcagatatcccgctgaaaaagaaaacctatcaaaaagagaaagcagaggcattactggatgaggcaggctggaagctgaaagaagacggctaccgctatcaaaatggcaaaaggctgagtgtcgccatttactataattccgataatgcaggtgaaagaacgataagtgaatccattcaacaagatttcaagcaagtggggatcaagctggatattagaggagaagaaaaacaggcgtttttagatcgccaaaaaacagggaaattcgatctgatgtactcgctatcgtggggacttccttatgatccacaaacctatgtttcttcgttccgcgtagcatcgcatgctgattatcaagcccagttaggattgaagaagaaaaagtggctggacgagacgattacgaaagtattggtagaaccagatgagcaaaagcggaaacaaatgtatcgagacatcttgacgtatatccataatgaaaatgtctacatcccaatttcttattctgtgacaaaggctgtttataataagcgcctgaaaggcataggttttcatgtgtcacagtatgaaattccctttgaccgtatgtatttttcttcataaagcggaggcagaaagatgacacgctatctcttaaaacgaatattactgcttttcccactcatgatcttcatcaccttctttgcttttgtactgctgacgatgcgggcaagtgatccagctgaggtcgctttgcgggtgaatcaagtcactccaacagaagacatgattgaatcgatgcggcaggagctaggcttagatcagccatttcttataagatatgccacatggcttaaagatggattaacaggtgattttggcaggagttatgttacacaagagccagtttttgatctcatcatggaggcgctgcctgccacattgcagcttgcgggagcagcgctctttttcatcattgtattgagtttgttattcggagtgatctgtgcatatgctgctcatacatgggtggaccgagtactgagagcctttgtgtttatcgctgcttcaatgcctagtttttggttagggattttgtttatttggcttttttctgtcaaattcaattgggtcaatacgagtggaatggaaggattcaaatcaattcttctaccagctgtcacactatcacttgggtacttatcaacctatgtgagactgatccgcaatcaaatcctgaaatttcagcacgagccctttgttttttatgcaagagctcgcggtttaaaggaacgggctgttcaactgaaagtgatgagacatgcacttcaattagctgtgacagcacttggcatgtctatcccaaaactcattgctggcacagttattattgaaaatctttttgcttggccaggggttggccggttgtgtgtaacagctatttttcatgccgatttccctatgattcaagcctatttatttgtgatggggttcctttttgttgtgtgtaacctcatggctgatgttgtgcaaatgaccatgaatccgcagttgcgaaaggaggtctgagaatgatgataggatggcatcaattaagaaaagaccgtatggcggttgtttctatctggctgttagtacttgtcgctttagcaggactgcttgcaccagtgttagcaccacatgatccaacagaaacgaacattcttcaaaaatatgccggcatcagcctgacttatccgctcggaacggatcagctcgggagatgcgtattgtcacggcttttatatggcattcggactacgatgcttgcggccatgctgacgatgtgtatcacgatgctcattggcagcacacttggactcatggcgggcttcttccgaggaaaagtggatggcgtgttgatgagactgtgtgatgtcatgctctccttcccagcagaagtaatgattctagctgttgtggggatactggggcctggattattcaatattattttggcgaatgtcctagcgaaatgggcctggtatacaagaatgattcgttcgtccgttctgcagtatgcgaatgaaccttctgttcagtatgtaaaagtgtctggcggctccccattttacatactgaggaagcatttatttcctcgcatttcaggagaaattgctgtctttgcgacacttgatgcgggctgggtcatcttaaatatatctgctctgtcttttcttgggttaggcgtgagcgcacctacaccggaatgggggatgatgctcaacgaagcgaagaatgtcatggtgacacatccagcccatatgcttgcgcctggacttgccatcttatttgtggtcatggcgctgaactttttaggagacagccttcagcaggccacgacccctgccatgcatcacaacaatcaaaagggagggagaccatttgcctttcatcgacgtaaaaaatctgtccgtacatgatccagtgcagcaaaaggatttagtggcgaacataacgttctccctacagcaacaacgttgtttagctgttattggagaaagtggaagcggaaaatcaaccgtcgcaaaagcgttaattggcttgattccttcttcgctagaagtggagggagcgatcatgtttgacggcgaaacattgacaactcagacagctgagcagtggcgaggcaaacgaattggcttcatctcacaagatgcgatgaatgcgttcaatcccatcgaaaccattggtcatcaaatgatggaaacgttccagcgtcatttgggcttacaaggaaaagaagggaaagcacatgccatcgcaggacttgagcgtgttcatttaaaaaatccaaatgaattgttgaagcaatatccttatgaattatctggcggtatgcttcagcgagtgatgattgcgatcatgatgatgctttctcctgatgtgatcattgccgatgagccaacggcgtcgcttgatgcatataatcggcgtgaagtcatcaggcaattacagaggctgaaagaagaaacaggcgcggccttgatcatcatttcgcatgatttaggcgtcgttcaggcgatcgctgacgaggtgttggtggtgcatcaaggcgagatgcttgagcatcgcccagctgataaggtattcacatcgcctgagcatccccaaacgaagcatttacttgagacgaggcgccgattatctgcgcctcttgaagcactgcggcagcagcagagagtgagggcatttccatgttgattacagctgatagcctcatcaaacatggagagaagaaaggtttcttctctcgacaaatgcagtcaaaaccacgcatatcaaacgtctcgtttgaaatcgaaaaaggacaatgtgccgggttagtcggtgagagcggcagcggcaaaagtacattggcaagaattctgctcggtttagaaaaaatagatggcggcaaggtacagattgatggaaagccagctgacacatggcgaaagatgaaccgaggaaaaatgagtgttgtctttcaggattatcgatcttctgttcacccctcctttacggtgaaagaaatcgttgctgagcctatgcgattgttaaagcaggaaaaaaatgtggatcagaaggttttatcgttgcttgaacaagtcagactaccctcttctttgctgtatcaatatgcacatcagctaagcggcggtcagctccagcgagtgtgcatcgcacgagccatatcaacgcatccagccattctcatactagacgaagttctgagctcactggatgtctctgttcaggtgcaaatattggagctgctcgagacattaaaacaagagctagacatgaccatccttatgattactcatgatatagaagcggcggtgtatctatgtgatcgtctcctttttttacatgaaggaagcatagtggaagaatgcaaaaaggatgaactgcttgatgcggtccatccatttacgctgaaattaatggactcacttatgccatttcagcttgacaaaaaataaccaatcttttatcgtatacgtaacaaacgacggaagggtgacccaatgcaatgaagtactaatcctatgacctgtaagcaaaatgaaaaaacgaaggcagtgagcaaacgattggtttgccatgtttgctgcgttttcattttttagcttcggaataggatggtacagcttgggaatcaaagaatgaggtgattgatacgggggatgtgtgtgttcagataggaacgcggcacgtcatcctggattgatctgcttatttttgtacaccattttgcctcctattctgagaatgggaggctttttcatgtctcctgatacgaaaggagagggttggatgttagtaaaagccaatcagttaaagatttttcgaaaagatcgattgttatttgatattgaggagcttgccatccatcaagatgaccgcatcggccttgtggggacaaatggcagcgggaaaacgactttattgcatgtgctggctgggcaagagaaaccagacagtggcacgtttgctgccacaacgacctgcacactgcttcctcagctgaaacaagctgatggcacacagagtggtggtgagatgacccagacttatattgaaagcgcgttaaaccgtccttctgcccttttattagcagatgaaccaacgactcatttagatacagagcacattgagtggctggaagagaagctgcatcattatcaaggggccctcattgtcgtttcacatgatcgtgcttttttagatgcggtatgtacggagatttgggagctggatcatggacggcttaatcaatacaaaggcaactactcgcaatttgcacagcaaaaagagctggcgcatcgtcagcaggtggaagcgtacgaagcttatacacaaaagaaaaaacagttagagcatgcgcttgaaaagaaaaagaaaaaagccgacaaagcaacaaagccatcccaaaagctgaaatcctcagggccaaaaattgcaaagccctactatgcaaataagcaaaaaaagctgcaaaaaacagccaaatccattgagacaaggatggagaaattagaaaaggttgagaaagtaaaagacattcagcccattcaaatgactcagcatacaatgaaggaagtagcgagccgtactattttgcgagtgaaaaatgtagatggcaaggcgggcgatcaattgctttggaagcaggcaaatgtggaagtgagaggcggggacaaagtcgccattatcggcaagaatgggagcgggaaaacgacatttctccgaatgctagtgaatgggcatcccggagtgtctcgctcagaagctgtcaagctcggctattttcgtcaggatctttcaggattgaaggtagatgaatcgattttacaaaatgcgctgaaagaggctgttcaagatgagacagtggtacgaacggttttagcgagactgggatttcgaggggatgatgtgcataaacctgttagggtgttaagcgggggagaacgggtgaagaccatgcttgcgtccttgcttgtcagcgatgccaatgtcctcatgctggatgaaccgacaaactttctagatctgtcggcagttgaagcgcttgaaggtctattgaaggattacccaggtaccgttgtgtttgtttcccacgatcgcagactggttgaggaggtggccactcgcattttccatgttcatgaaaagcgtattgaagcatttgacggcacatatgaagcgtataaacaaaaggacgacaaaccagctgttacacaaagagaagaggagcttcttttaattgatatgcagctgtctgaagtgctcagccgtttaagtattgagccgtctcaggagctggaagagacatttcaagcattattgaaacaaaagaagtctttggagtcataaagaaaacccctgtgtttactgcacaggggcttgttcatgccgttcttttgttaattgttcaagttcacttactgtgaccagctgatagccttgtttggtgagctcatggatgatcttcactgctgcttgagctgagctgtcataaatatcgtgcattaacactgttctgccatctgctgcatgtgagagaacatggtttgtgatctgctgactgttgcgaattttccaatcctctggatcaacatcccataaagagaccttcatcccaaccgcttgattgatgtcttgatttgttccaccatatggcggtctaaagtgcgtaggtgtatacccgctcgctttctcaatcaactgctgggtgtccttcacttgtttcaccgcctcctttaaaggcagtcttgttaataaaggatgactgtaagaatggtttccgatttcattcccgccttttagaatatctgcaagcatactaggataatactgcaccctgctgcctaatacgaaaaaggtcgcatgtcctttatttgcttttaatgcatctaaaatttttgatgttgtcgctgggttcgggccatcatcaaatgtgagggcgatggcttttttatttgggtcaagctttgatttttgcggcagcttgacggcttttcttttcggatttggttctttcatttcattttggtttttggttttattcatatattctggctttaatatatctttcagcagcgtctttttaatcgcgagtgtttgcggaccaagatccttgtcggctacttgagatgctgggaaataaaattctacatatttctctttcaaggcaaattgactgaagttttgagcagtaggggctgttcctttctgaaggagagtctgatccttagataaggttttgtccttttgaagctctgaatatgtaatgtaggataatttcttcaaaaagttggttttaggcagaaataaatcttttgtgtcaagaaaggtttttttctgaaaatcatagttgatcgtgagatgattggtggtcccattttgctgacctgtataggtataagtcgtaaagcgaatagcagcagactgcttcgcataatgcaccatatcataatcaatattcagttcaaagcgtttgttttcatcgatgtccttggcttcactaaacgtctttttgaaatgctctaatgctgaattggcgtagctttgaatcttgtcatctagctgtttttgatgaaaaagaggatagttgactgcatatctcataaatttcccgtcatttacgagagtaacgatttcgacatttttatagttcgtatcctgctttacatttttcttctctgtaccgcttgcttgttgattttgaaagaaagcaacgactccaatgatgatcgcaagtgcaaataggctgatactccattttccctttaatgacacaacgttcaaatctcctctcatgacgggccattctttatcagtttgacatctgtttgtaatatttttataacatttgacttacttttgtaattttagaggatgttcaggcggaatgtcaactattttcctattaaactatgagaaaaaatgataggccattccaaacgagcaaaagacacctcattttgctgccacacacataccttcattaattaaaaaatagggtgtacattgatttttcagaggcagacggctataattttgatgattatgattctcattttcaaactgacttttaatgaagaaaaggatgacaccgattttgcaggataagcgaacacctcaacaaaaacgatcatcacatattctgttctttttgatattttttctcgccgtcattggtttggcggctgccatgtttttggctgtgtcatatggtgccaaaacattgtctctgcaaacggtttggacagctgtatttgactatcagtcagatgtcacagagcagcagatcatccatgaattaagacttcctcgtgttttaggagcagctcttgttggagcggcatttgccgtagcaggtgcgctcatgcagggcatcacaagaaacccgctggcagatgcggggattctgggcattaatggcggtgcgatgtttgtggtcgctctctgttttgcctttttcccagaaatgccttattcgacacttatgtttttttcctttattggtgcagtgcttagtacgctgctgatctttgcgattggggcggctggtggagttttgacaccgctgcgcttaactgtagcaggagccgttgtggctgcattgcttcatgcgcttagctctgggatcgcgatttattttgacttgagtcaggaccttgcgttttggtatgcaggcggtgtggctggtgtgaaatggccgcagctgacgattcttgccccagtcattctgatagtgatcgtatgggcgatgctattagggcgttcactgtcgctgctgtcgctcggtgaagatgtagcggcaaatttaggggtgaaaacacgacaagtgcgaatactaggaatggcagctgccgtattattagcaggggtttctgtatcagcagtcggatcgattgggtttgtcggtcttgtcatcccgcatatcgcaagaaagctggttggtgtaaactatcgtttcgtcattccgatgtcggcgatattaggctcggtgctgctagtctttgctgaccttgccagccgcaccgttaatccgccccgagagcttgccattggcgtgatggtggcacttgtcggtgttcctttcttcttatatattgccagaaaagaagggaggaacctgtcatgagagagaaacagcgggctcttgtcgtgacagtcgttttgctttgtttgactgcggctgttgtgctgtatagcttaaataccggcacgctgaaactaagtcctctagtggtcgtcaaaacgttattcggctttggggattttcaaagtgaaacggtgctgtttgactatcgtctgcctcgaatcgtggtgacgatgctggcgggaattggtcttggcattgcgggcggcattttgcagagcttatctcgtaacccgctggccgatccaggaattattggactgaatgcaggagcagcatttggcttaatcgtgtttgtgacgtatttccatgcactagaaggcaatccatctcttcttattccgctctttacatttggcggagggcttcttgcggcagcggtcatcgtgcttctggcgtataaccggcaggaagggcttgttcccatccggctgatcctagtaggaattgcggttgcggcgggattcagtgctttgacgttatatttgtcattgaagctggatgaagatacttacacatttgcttcaagatggcttgtcggtaatgtctgggggagagactggattcatgtgttagcgcttctgccttggattgtatgccttgtgccgcttacgctgatgcagtcaaacacgctcaatgcattgacattaggagatgctgtcgcctcaagtgtaggtgtacgtgtccagcgtcagcgtctccttttgctgaccttagctgttggtttggcgagtgcaagtgtttcgatgacaggcggtattggttttattggacttgtcgccccgcatttggcaaggcggcttgtcggctcactccatcagtattttttaccggttagtgcgctgcttggcttgttgattttggtcagtgccgatacaataggacgttccatctttgccccaaatgccataccagcgggtgtggttgtggcttttattggcgcaccttattttctctatttattaacaaaaacgaaataaacgtgaaagaggaactcatcatgaaaaaattacttgtgcttggtttaacgctctgtttcattatgcttgccgcttgtggtcaacaggaaacaaagaatacaacaactcaaaatgatcatggaacaccgaaaattgcttccttgtctatccatttaaccaatgacttattagcactcggtatcaagccggcaggctctgttgtaggaggggacttaaaagatttccttccacatgcgaaaaagcagctgagtggtacgaagaagctgggcatcgcagccgatcccgatatggagtcactgcttgcattacaaccagatgtcatttatgtcgatgaagaactagctggacaagacttatcgaaatataagaaaatcgccaaaacggaagtgtttaatttaaatgacggcacttggcgtgatcatttgaaaaaaatcggcaagctcgtcaataaagaaaaagaagccgatcaatatattcaggattacaatcaagaagcaaaagaagtcaaatcgctcatcaaacaaaagattggaaacgggaaagtaatggcgatccgtgtgacggcaaaggagcttcgagtatttagcatgaagcgcccaatgggtcctattttatacgaggatttaggtctgacacctgtcgatggtgtgaagaaactggacagcaagcggccatttgaagtgatttctcaagaggttcttcctgactatgatgcagatgctatctttgtcgtcgtgaatcgtgatgataaagcgcagcaggcattcaagcaattagaaaagactccgatttggaagggtctaaaagccgtgaagaaaaatcaagtctatccgattgccgatcagccatggctcgattactcagcactaggcaataaaatggcattggatgaagcaaaagagatgttttctacatcaaaataaaatgaaatcaggcatcattccttatatgggaatgatgtctctttttttgatccggtcttctattcattcggtttttgcatacatatgagagagaacgagcagtaccgcccgtgaaggggaagaaagggaggggatacagttgaaggttcaaaaaattagtgcaggtacaatcgcaaggcttgtgctgcttttgctcgcgcttgtcaacagtgctctaaccgctgcgggaaaaagcccaattcctattgatgaagaaggtattcagcaatttatcacgttagcctttcttgggattacatcactatgggcctattggaaaaacaatgatataacgaaaaaagcacgaacaaaaaaagaagaataagagaaaaaagagccttttcatgataaaaggctctttttcagcgaagcgtcaaacgcctctccccgcaatttgactcttcctgaaaggcttacgcccgtcgttctcccatgttggcgaggaatgcttttacttcctcaatgcttaagccgatagctttcgcctcactcatcagacgcttccactctgatatattcgaatccgtcagctttctatgagtgacatgtaacgtcttttcttcctgctcctttcggtacgtttggagcagctgatagagttcttctttcggcatgccggattggacggcattgacgatatgctcccgccattcgtgttcaccaccctcagagtaatgaaacatcatcgtctctgcatcaaacagctcttgtaaatcaatttctagtgaagaggataccttttttaaaaactggacagatggatttctgtggacaccacgctcaattttactcaaatacgacttagagacatgggcatcttcagccagctgctgaatggagtatcctttcctctttcggtaaatgcgtatcacctttcctatcattcttatcaatgatctcccttctccctggcgaatcgtactgcgaccttttcgttcattataagaaataaattgttctttataaaattcaaaaacgtaagaaacaggaagtaaacaaaagaaaacgaacgatttcgttctttaaaaagaactataagacctattatgacatttttctttgcgggtattatcttttataatccaatcattaacaaaaagaaaccatatataacctttttatgatgaaatcgggaggtatctatgaatgagaatataggttttaagcagctgttttctgtcattaaagagaaaatggcccttctgatcctgattgtcctgatcgtaacgggcacttcagcctactatcagttctatgtctcgactcctgtatatcaggcaaccactcaaattcttgttcataaacgcagcaatgacgcacaagcaaacttaaacgatattcagatgaaccttcaatatacacgtacctttcaagttttattaaaaagtccgatcgtcattgaaaaagtaaaagaaacactcaacctcacagaatcagctgaaggattaaaacacaaaattgccacaagtacagaaaatgagtctgaggtcatcaatatttctgtacaagatgaggatcgcgcaaaggcagtcgccattgcgaataccgcaacagaggtgctgcaagaagaaatcaaaaaaaccatgaatatggatcgcattaatgttttgtctgaagccaagctgtccaatacgattctcatgaattcaagaaaattcgttcatatcgttctggcactaggtgcctctttattaggggggatgacactcattttcttaatgaatttactcgatgatactgtaaaacgaacacatcaaataagagaagagatcggattgccgtcgctcggaagtgtctatcagatgcaggcagacaggagggcaaaaaaagacaagcagtccgtcataacgggaggacagaacattgatctttaagaggaagaaaagagaaaagagagatttatcctgtatttctgtattaaatcctcactctgtcattgcagaacaattccgtacaatccgaactaacatcgaattcacatcaatccaaacaaggctgaaatccatattggtgacatcctccttgccgaaggaagggaaatcatttacggctgcaaacctagcagctgtttttgcacagcagaaaaagcgggtgctgctgatggatgctgatttgcgaaagccggctgttcatgaatattttgacctgagtcatcacacgggtttgaccaatgtactattaaataattgcagcttggaggaagctattttgccaacacccattgagcatttagagctgcttccgagcggaaccattccgccgaatccagctgagctgctctcctcttctgtcatgaagcagctgttttatgaaattgaacagcaatatgacatggtgattgttgattccgcgccgcttctgccagtggccgatgcaaagatcctggcgaaccggaccgatgggagcattcttgttgtcttaagcggcaaaacaaagatagcggctgtgaagaaatcaaaagaagtgttagaaggaacaacaggtaaactgcttggggctatgctaaatggcaagaaagagaaaaagggaaggctgtatatgtattaacaagattgataggtgatgtctcctaatctttaacaatggaggcactcgatcctgctgtgggcatgacaaatgccttagatgctcgtcatcaatagtggggtgtgaggacgggtttgatgcccattttacgtaagaatagtgatgttgaaaaagggggaggagcgttgacttacgcccaaagattatcaatcatcgtggcactagattcatatctcatcttagtggctgtcttttttggctttcaatttgtccaagaagcggcgttaactgtttatacatttgaaatgctcgtcatttcttcgctcagtttgctcattgggcaccatttgttttcgtatatttttcacgtgtacaagcaagtatgggcttatacaggggtaagagagctattttctttaatgaagacctttgtgtgttcttttttattttcaatggcaatgctgtaccttttcgtgcagacatggccctttcggtttttgttcattgtgtggcttttccacgtattattcatcggtgcatctcgaatggcctctcggctatttcatgatggtgcaaagcggctgcaggtagaaaaggagcgggccttaatcattggcgccggatcagccgggaccatcatcgttcgtcagcttcagcaatcgagtgatgtacatattgaaccagtcgccttcatagatgatgacaagacgaagcataagcttgaaatcatgggactgcctgttctagggggaaaagaacagattcaaacagctgttgtgatgatggatattcaaaagatcatcatcgccattccgtccaaaagcagccataccttaaaagggctgtataaggaatgcgtagcgactggggtcaaaacgcagatcatgccagagatggagcagattttaaaaggaactcatgcgctgaatcaattacgggatgtacagccagaggatttactcggaagagaaccgattcaattagattcaagccgtctatctgtccatttaaaggggaaaacgattatggtcacaggagcaggcggatcgattgggtcagaaatctgtcgtcaaatttgtgtgtttgctcctcaagcgattgtgcttgtgggacacggggaatttagcattcattctattttactagagctgaaagaaatttatggggacaccatcagtctctatccacaaattgcagatatccaagataaacagaaaatgagtgaaatcgttcgtcagtttcagccggatatgatttatcatgccgcggcacataagcacgtcccgctcatggagatcagtccaaaagaagcagtgaaaaacaatattatcgggacaaaaaatgtcgcagaagctgcacatgagcatggcattgaaacattcgtcctcatttcctctgacaaagcggtcaatcctgccaatgtgatgggcgccacaaagcgatttgctgaaatgctgatcatgcaaatgggggcaagcagtgaaacaaaatttgtagcggttcgatttggaaatgtactcggaagcaggggaagcgtcattccaatttttaagaaacagatcgaacaaggcgggccggtcacggtcacgcacccagccatgacaagatattttatgaccattccagaagcatcaaggcttgtcattcaggcgggtgcactggcagaaggaagacagatttttgtattagatatgggggagccagtgaaaattgttgacctcgcagaaaacctcattcacctctcaggctataccacagaccagattccgattacgttcacaggcattcgtcctggggagaaaatgtatgaagaattactcaaccagcatgaaaaagcacaggaacaaatttttccgaaaattcatatcggtcatgcgctggatggggacccatatgtgctgaaccgctttatccatgaatttgacatgatgagtgaagagcaaatgagagaagcattgtttgctgccatcgaatcgcatgatttgttgtctgaacagatgaccagagaggaggaagcgcttgccaatgaagaaaaaagtcttgttttgcgcaacggttgactatcattttaaggcatttcaccttccatatttccggtggtttcaggaacaaggatgggaagtgcatacagcagcaaatggtcagctggagctgccctatgtggatcaagcgcactcaattccgattcagcgctccccttttcatgtgcacaaccggtttgcgtatgtggagctgaagaagctgttagcgaaagagcactacgacttcatccattgtcacacgccaatgggaagtgtcattggcagacttgcagccaaaagtgcgcgcaaaaaagggacgaaggttctttacacagcacacggctttcacttttggcagggggcgccgcttcaaaactggctgctctattatccgattgagcgatggctcgcccgccatacagacgctttgatcactattaatggagaggattttaaaagagcagatcgtctatcaaaagagcgttcatctgtctattatgttcccggtatgggtgtggatatgaaacgatttgcaccagttgatgaaaaagagaagcagcgtcttcgtgcagtctatggcttttcctcggaagattttattgtgctgtgtgctggtgaattaaatgcgaataaaaaccaagggatgctcatcaaagcatgtgcacagctatataggaaaatatcaaatgtgaagatcgtatttgccggggaaggcacaatgaggccgatgtatgaaaagctggtttgcgggctccatcttgaaaagcatgtccactttgctggtttttgcaaacaaattgaggaatggatgcatatgagtgatgtatgtgtgtcgactagtttgagagaagggcttggcatgaatctgcttgaagcaatgtctgcggaaaaaccggtcattgcaacagaaaatagaggacactgtgagctgatcagacatggcgtcaatggttttttagtcaaaccgcatgatgtaaatggcttggctgaatatttgcaccagctctatcacaaaagggatcagctgcccctcatgggaaaagcgggacgctccttagcgcatgcatttgcacaggagcaggcggtgagtgctatggaagaaatttatacaacctatatggatcaagcagagaaggtgatgtgagcatgcgtaagccaaaggtgtctatcatcatgggcgtctacaattgccaagacacagtagaagaaagtattgaatccattcttcatcaaacatatgacaactgggagctcatcatatgtgatgacgcatcaacagacggcacctatgaaaaagtgctgtcttatacaaaacgagaccctgaaagaattcgccttatccgcaatgagcataatcaaaggctcgctgccagtctgaatcgctgtctcgctgaagcaaggggagacttgattgcaaggcaggatggcgacgatatatcagtacctgttcgtttagaaaaacaggtgcatttccttgaatcatatcctgaatatgatgtggtcgggacggcgatgaccgtgtttgatgaatcgggtacaaaaggtatacgtgcactgatttcagagcctgatcggaaagtgctggcaagagggacgccgttttgtcatggaaccattatgatgagggctgctgcatacaaggctttacatgggtatcgctctgtgaaaacaacaaggcggatggaagatatcgatctttggatccgtttttttgttgcggggagaaaaggctttaatttacaagagccgttataccttgtgagagaggatgaagcggcctttcagcgccgtaagtttcaatattcgatggataatgcctggcttgttttaaaagcatgctggttattaaaattgtcgccggttcattatctgtttgcactaaagccggtggtccgcgcctgtttatcaccgaagatcatgaaattttatcaccagcggaagttggaggcgtctttgttgaaaaggaggacgattcgggatgagtgagccaaagcgtgtactccatattgtgggcgggatgaaccgcggcggggctgaaacgatgatcatgaacatctatcgtgcactcgatagaaatgtccttcaatttgacttcattacccaccgaaaggatgtctgtgattatgatgaggaaattcagaggctcgggggacgtatcttctacgtcccaagtattggggcatcctctcctttggcatttgtgaaaacattgacaaagacaatcatacgaacaggaccgtatcaggcagtgcatgcccatacggattttcaaacaggtttctccgcacttgctgcgaaattggcgggtgtgaaggtgcggatttgtcattcgcataatacagcttggaaacagtcgccaaattgggtagaccatatgatgctcaaagggtttcgccagctgatctttgcattttctacgcagcttgttgcatgcggtgaggatgccggttcctttttatttgggcagaaaaaaatgaagaatggacaagttgaggtgctgccgaatgggattgatttatcccttttctttcagcctgatccagacgaaaaggtgaagatcaaaaagcagctgggtcttcacgaaaagagcatgattattggtcatattggccggtttcatgagcaaaaaaatcacgttttttttatggaactggcacagaccttaaagaagcagggggtctcatttcaacttgtccttgtaggggatggaccgctgaggcaggtggttgaatcatatgcggagaaggcaggcttgttagacgacattgtctttacaggcgtcgtatcagacgttccgcagtatatgaaagcatttgatgtatttgtgatgccgtccttgtttgaaggacttccgcttgtattagtggaagcacaggcatctggattgccttgtgtgatttcagatcatattacagaggaagtggatttaggctgcggtcttgtgaaaagaatgtcgctgcgggattctgcgcatgaatggatgaaggcggtgcttgaagcatatcatgcagagcctcctcttcaagagaccattacgtcccagcttgaacaaagaggatttgatgtcaaacagaacatcacacgtgtgatgaatggatatggactgtaaggaaggaatggcagatggcggtttatttggtgaacatgatcatggtctatttatggtcgagctttgccgcattttacggcaggcgtgatgataccattcaaagcggatggcggcctaacaagattctggtgttatttccgtttttgtttctttgtattgtcgctggtattcggtacaaagtaggaaccgattttgtcacatatggacagatgtatgagttctccgtcaattatgaaaagccttggcatatattcggatttggtgtggacaaggcggccactgacccaggatttacgtttattttatggatgctcaatcaactgtcccgtgatccgcaaatcatgtatatctcggttggggcgatcacctatttttttatcatcaagacgctcattcaatatggccgtccctttgagctgagtatgctgctttttctcggcacttttcattattacgcttcgtttaatggcatgcgtcagtatatggtggctgcggttcttttttatgccatccgtcttgtgatcaatggtcagtggaaattgtattttccgcttgtcctcgtatgttcattgtttcattcatcggctctcatcatgattcctgtgtattttatcgtgagaacaaaagcatggtcttggatgatgctggtcttatgcatgattttcttagggttaaccgctctttatgaccgctttgtttccgtgtttgtcgtgatgctgcaaggcagttcatatgggcattacgaggaatggctcacaacgaatacgaatggaatgaatgtgacaaaaattggtgtgttggttttgccgcttttgcttgctttcctttatcgaaaacgacttcgtgagctgacgcctgagagtgattacattgtgaatttttgcttgctcggtttcttgtttggcatccttgctacaaaggatgtcatttatgcaagatttcatatttattttggcttgtaccagctcattttactgccatatttcacccgtatttttgatcagcggtctaatgtctttatctatgtagggattgctgtttgctatattctgtacagtatcatgctgatgccgttcgattcatctgttttaccgtacaggacgatatttacaaagtagatttggagaaaggtggggcatgttgtaatgccagctatcagtctattggtcgcagtctacaatacgagtcaatatgtggagcaatgccttcaatcaattgcagatcaaagtttttcagatatagaggtcattctcgtgaatgatggatcgacggatcacagcggagaatgtcttgaagcgtttgctgcgcaagatcagcgctttcgggtcattcatcaaaccaatcaagggttaggcgctgtgaggaaccggggcatcgaagaagcaaaagggacgtatatcgcctttattgattcagatgatattctcgcgcctcattactgtgaagccttgtatgaaaaagctgaaatgaccggcgcagatcttgttgtcagtgagtactggattcaatttgaacagtcaaagcgaaccataccaacgacgctgttagccgagcgatcagccgaaaagacgagtttaattgaagcgttattgcacggagacatcacggggttttcatggaataagctgtatcggcgtgcctttatcgaagaacatcacattcgatttccgctgcggggggaacttgagaacatagaagatcaatatgtgacgctgcgctgtttttctttatcacgcagcatcgcctttgttcatgaacctctttattactacagggttcatctgtcatctattgtgcagcgatatcagaagcagtattttcatcatggactgaccttttatcatgcgcagcgcttgtttttgaaagaatatgatgacatctctctgtatgagaaggcacttgatttttttattgtcaatcatactcttcattgtatgctcaacgaatggaagagccaaaatgccctctctattcgggaaaagcttgatcacatgcgggaaatggtgacacacgaggcctttctgtatgccgtcaaacaagtggaaccatcgaagctcaccgctcgaaagcgaatgattttattccttgctaagtgccggttggtttatccgctttctgccgccgcttcaagctatcaaaaatggatcgaatatcaaacaaggaaataggggtgatgggattgacattgcagcaattgaaggcgcacgccgcagagtggctgctcttaaaggttaaatatccacttgaatatcgactgagccgccaaagcctgccagagctgagtcatcagaagaaaatcattctcacgctgctgccggggcatgataatttaggggatcatgcgattgcctatgcgagttattgttttttaaaagagcactttcccgcttatgacatcatggaagtggacatgaaagagatctatcgcctcgctcgtccgttaaagcgtatgcggcacccagaagacatcgtctgtatcatcggtgggggcaatatgggggacttataccgttatgaagaatggacgagacaatttatcatgaagaccttcaagtcctatccggtgattcaactgccggccactgcccattttacagaaacaaagagaggaaaaagagaggaacgccgcgccattcagacatacaaacatcatccaaggctgcttctcatggcaagagatcaaacaacctatacttggatgaagcagcacttccctgatcaagatgtgtggaaacagcctgatatggtgctgacattagacgaagcatcaaaggaacaaaaacgtgaaggggttctgctttgtctgcgtgaggataaggaagcctatctcaccaaggagagccggcagcagctgcagcagcatattcaagacacgtatgatcaagtcggtttcatcacaacgacaattggcaaacgagttgatcgaacgactcgcttagatgaattatctgccttatggacagagttaagaaaggcgcaggtcgtcgtgacagaccggcttcatggcatgatcttttgtgcgattacgcatacaccgtgtgttgtcctcaggtcgtttgatcataaggtgatggaagggtatgaatgggtggctcttcttccgtttttgacgctattaaaagaaccgaatgaggcggctgtgaaagaggcgattcatcagctgatgaaaacgagcggacaaaagggagaggaagctggatgaaagcttttaaacgctgcgtgaaaacaaaatgaatcgagcgtttctttacaatgccagtgcaaacttcatgacgtttgtcttgatgatgcttatgtctgtttgtttaacaccgtacatcgttcatacacttggagtggaagcattcggcttaatccatctgacgcaaaatatgatcaactatttatcggttattacggcttcattaagtgctgttgttgtgcgctttttttctgtggcggctcataaaggagaaatggagaaggcgcagcgctatctctcatcttatttcgttagttccatttttttatcgatcagtctttttctgttttgtctgttcatgtcccgtcagctggtagagtggcttcatgtgcctgattatctcgcaaaagacacacagaccgcctttatattagggggtcttttatttatgctcaattttgtcatgtccggcattggggctgcgccgttttatgcgaataagttatatgtatcaagtgttggtcagtccattcagatgtttttgagggcatttatgattatgatgctgtttacatggacggcaccagccatctggcatattccgcttgcggccgtcataggaagcttggcggctatgggaatcggtatctattattttaaaaaactcattccttggttttcgtttaagtggcggcacgtctcattatcttctagtctcacacttgttcgatcaggggtctggcattcttttgagcaaatgggaattttgttgtttttacaaattgacttattgatgaccaacctgctcattggagcggaagcgacgggacagtatgcggcgattttacaattcccattattattacgcacactcgcagggacactggcggttgtatttgccccaacgatcacgaaattttactcgaatcaagatgaagaaggtctcatccaatatgcagccagtgccattaaatggagcggtttatttgtcgcgttcccagccgctctactaggagggctcgccggtccgctcatgcttttatggcttggacctgcctttgaagagctgaaatggcttctcatgattcatgcagcttatttatgtttgaccttgatgtttttaccgctgacatatgtgccgaccgcttttaatcgattgaaagttccagcggtggtcacgctcatattaggagtatccaatgtgatttttgcctatggattgactcatatgcttcagcttggcttatatggcattgcatcagcaggagcgatagttttattgatgaaaaatatcgtgtttctgccattttatacggcccgcatcacgaatcagaaacgcaccatcttttacaaacatacattggttccacttgcaggagcactcatgatttggggcgtctgtgcagggattcaggcgttttatgacgtgaactcatggttggagctgttttgtattggtggtctttgtttcattctctatatgggctacttgtatcaatttgcaggaacaaaacgagagcggcagcagctggtgcataaggtaaaacaagctgtttcccgctagtgagataaggagatttaatgatgaaaagaatgttagatgtgatggtggcattgacgctgctcatcgcaggcagtcttctttttcttctgatttatgggctgattcggtggaaaattgggacgcctgtgttgtttcggcagaagcggcctggtctgtatggccggccatttatgctatataaatttcggacgatgaccgatgaacgcgacgagcacggagggctcctgccagatcatcttcgattaacaaaaaccggcgccttgattcgcaagctcagtcttgatgaattgccgcaattagtcaatgtcctaaaaggagagctcagtctcgttggaccaaggcctcttctgatggagtatcttccgatgtatacagaggagcaagcaaggcgccatcttgtaaagcctggcattactggatgggcacaggtgaatggaaggaacacgatctcctgggaggagaaattcacctatgacctctggtatgtcgagcatcaaacgttttggcttgatatgaaaattttatggatgaccttgctgaaagtcatcaaaacagagggggtgcagcagccgcatcatgccacagctgaaaaattcaaaggaaccgatatgtaaagagcaacccataggtttaattggggctggcgggcatagcaaagtcattcaggaaatgattgttgcacatcccgattactcattatgtgccgtattagatgatcaatttgaagaggaggccactcaaagcggcatcttgaatggaccgatctccatgagtcaacagctgagagagacaatgcctcatatgaaatggctgattgctattggacaaaatgagatgagacagctagtaaaggaacgcctctcatttgaaaacaaggcgtttgccacactcatccatccagaggcggtcataagtccatcagcggtgattggagggggaactgtcgtgatggcaagagcagtggttcaagcagatgcagcaatcggtgaacatgcgattatcaacacaggatctatcgtagagcatgactgtatactcgaatcgtttgtgcacctatcaccaggagcagtgttaactggctgtgtgtctgtacgaatgggtacccatattggggcaggtgctgttgtgatacccgggatatcgatcggaagctggacaatcattggcgcaggagccgcagtaacaaaagatatacacgatcagaaagtcgctgtaggcattcctgcaatagaaatcaaagatcggagagaaggtgggaaatgatgcaagaaaggaaacgaatttacttatcaccaccgcatatgagcggaaaagagtatctgaaaatagaggaagctttcaagagtaactggattgcaccgcttggacctcttgtgaatgaatttgagcaggcagtcgcacgctatgcaggagtgaatgcaggagcggctttatcttctggaacagcagcaattcaccttgcattaaagcttattggcgttcaaaaaggtgacattgtcttttgttccaccctcacatttgttgcaactgcaaatccgattttatacgaacaagccacacccgtttttattgattctgaaagagatacatggaatatgtgcccgcttgctttagagaaagcctttgtggaatcaaaacgacttggaaaaagaccccgtgctgttattgtcgtgcatttatatggacaaagcgcaaaaatggacgagattctggcgttgtgtgaagcatatgatgtaccagtcattgaggatgcggctgaatcgttaggtgctctatataaagggaaaaaaagcggctcaatgggcaggttcggtgtctattcgtttaatggaaataaaatcattacaacatcaggtggcggtatgcttgtgagtgatgatgaagctgcgatcgaacgctgccgctttctcgcttcacaggctagagaacgcgccatgcattatgagcatcaagagataggatacaactatcgcatgagcaacctgctagcaggcgtcgggattgctcagatggaaatattggacgagcgtgttgaacagaagcgacgcattttcaagcgttatcaggatgctttatctaaggtagagggcctgtatttcatgccagaatatcaaggcaccaagtccaaccgctggctgacgacattgactattgatcgtgataagagaacgtctccagtggacatcattgctgcactagaaaaagaacagatcgaagcaaggcgtgtatggaagccgctgcaccagcagccgctctttcgtaattgtcctttttattcagcagcgaaaggcactcccgtatctgagttgttatttgaaacagggctttgtctcccctctggaacaagtatgacagaagctgaacaggatcgtatcattgacacacttcgtaatgccctgcgagaaaaaacattcacctcttcacaggctgctcattcgtaagcagcctgtctctctttctatcaaattcatcaattaatggaataaataggtatatgtattgtcaattcgttttaaatatgatattgacaaaggggtccttcctccttaaaatgaaaatgattatcagcgtcaattaggaggaacatcttatgtctatttggagtaaattttttccgaaaattaaaataaatacagtattacctttcctgctaatctttttattagtaggctgctctcaagcaaacaatggagcagaaggaaacaaggatcatcctgacatgatcacgatggcttggccgagagatattggcgaaatgaatccgcacgtatacaacccatcgcaattgtttgcacaatcaatgatttatgagccattggtcagctatcaaaagaatggaaagctaaaacctgaattagcgaaatcatgggatgtttcaaaggatggcaaggtgtatacttttcatttaagagacaatgtgacgttctcagatggatctgagtttaatgctaacattgtgaaaaagaactttgattccatcttaaaaaacaaggatatacatagctggttaggtgttataaaaaaaatcaaaaagacagaagcagtagacaagaaaacgtttaaactcacattaacagagccatattatccaactgttcaagaattagcagttgtccgcccggttcgtttcttaggagaagcaggcttccctaaaaacggagatacgtcaaaagggattgaaaaaccagtggggacaggcccttgggtattaaaaacatatcaaaaagatgactatgccattttcgaacgaaatgatcattattggggagaaaaaccaaaggttaaagaaatcaaagtcaaggtgatcccagatgcggaaacgagagtcatggcatttgaaaaaggcgatgtagatgtcctttacggagaaggaaccattagccttgatgcctacaaacagctagaggcgagcggcaagtatgaaacaaaaatgtcagagcctgtagcaacgagacagcttgtcatgaacacaaaagtggatcagctgtcagatgagaaagtgcgtcatgcccttcaatatgctattaataagaaatcaatggtagaaggtgtcacctctggcttagaggatgaagcagatcacatattgccgaccaacatgccttacacatctgatattaaggtgaagtctttccagtatgatgtagacaaagcgaaagcattgctggatgaagcaggctggacacttccaaaaggaaaaaccgttcgtgaaaaagatggaaaagcgcttgaatttagtatgatgtatgactcagcagaatcgattcaaaaagcgatggctgagacgcttcaagcagaatggggagccattggcgttggcgtcaaacttgaaggtgtggagctggcaacacaggtgcagcgctttaaagccaacaaatttgatatgaacttctttagcaactacggagcgccttatgatccgcatacatttatgaacgtcgtctcatcagatggttttggattcaaagaagccatctcagcctatccaaataaggacaagctgatcaaagaaatgagcgaaattccatcaacaaccaatgaaaacaaacgaaaagcactttattcgtctgtgttatcttcattacaggatcaaggggcgattgtgccaatctcttattttaaaaagacagccgtttatcaaaaaaatgtgaaggactttgagttcccagcaaatcgtgatgaacatccattcacaggcattaagctgaagtaatagaaggaaggtaaggaaatgggccgctatatcgtcaaacgcatgctatcaatcatccctgtatttttattagccacactttttacgactggtatgattcacctttcaccagttgacccggctgaggcatatttagcagcggctcatatccagcctacggatgaaattttagcgcaaaaacgaagtgaatttggtttagaccaaccgttttatatgcagtatcttcacaccattgaaaaagtcattcaccttgattttggccagtcgtatatgtcgaaccagcctgtgctcaatgaggtgatctatagaataccagcgacgattcaattggcgctgactagtctgctgatagctatttgtgtcagcattccgctcggctttttcagcggcatgaggaaaaatggcgtcgttgatcatatgagccggcttatttcttttttaggagcatctatcccgacgtttgtcttggggtatttgctcatcttctttttttcagtgaagctcgatcttttaccagttgaaggggtcggaacatgggagcatctcatcctgccgtcgatcacactggccgtccctttaattgctacgtatacaaggctattacgatcaagtgtgagtgaggcgcttcaagagccttttgttcaatatgcgagaatcagaggattaaaggaacggtcgatcatgttcaagcatgtattgagaatcgcgatatcgccaatgctgacagggcttggggtgaatcttggcaagctgctgacaggaaccattatcgtagaggcggttttttcatggccggggtttgggcgcttctttattgaagcgatctttaaccgggatctgccggtcattcaattctatgtcctcatggcagcatgtatctttatcttgagcagcttgattgtggacttgctccaactgatcattgacccccgtatttccagaaaggaaggccgccagccatgatgacaaaaggaaaatatctcttctctcatcaaaagatgatctcgatctgtgtggtgctccttggtctattgctgattgtgacagtatgtgcaccgtggatcgctccacatgatccggcggctgtcaatctagcgatgaagctaaaggggtcttcgtgggagtatcctcttgggacagatcaattaggccgatgcaatttatctcgaattttatatggtgcacgtgtttcactaggctgtgcgttattaatctttctctcttctttattgattgggttaatcgttggtttgttgtcaggttacaaaggcggctggatcgatcacgtcttgatgagaatctgtgacgggatcatggcattcccgaacctggtgctgattcttggattagtcggcatcttcggtcctggactttctcaagtagtgcttgccttgatgctggtacaatgggtatactatgctcgcgtctttcgaggaatggtgctgagtttaaaagaacagaactttattgctgccgcaaaaatcagcgggacgtcccactggaacatcatgagaaagcatatgattccaaatgtcctgccgccactcgcggtcataggtacactcgaaatgggctgggcgattatggacatttctgcgatgtcctttctcggattaggcgttcagcctcctatgcctgaatggggagcgatgatccatgaagggaagtcgtacattcaaacgaatcctcagttgatgctgtacccaggtcttgtgatcatggctgtcgtggtcctctttaatttactaggagaggccctctcagagaaatatggtatcaaacgccgtgtgtaaaggaatgatcgatgtgcaagagtccattttacaaatagagaacctgcatgtgcagacgaaaacgcctcatgggacaacctctcttattcaggacgtatcgtttgaagtagggcgtggtcaaatcgttggattaataggtgagagcggctgcgggaaaacggtgacaagtatgtcgatcttacatatgcttgacccgaaaacaacggaagtcactggcagcatcacattacaaggacgagaattgatcggtatgagtgaaaaggatatgcgctctattcggggcaaagacatctcatatattatgcaaaatccaatgaacagctttacaccagtatggacgatcggtcatcagctgattgaaaccatccgccggcataccgctgtcagtaaaaggcaggcacgagcgaaggcaatggatgcgttagcgcagatgaatctgccgcagccagataagctgttaaacaagtatccctttgaactaagcggcggcatgctgcagcgtgtcatgattgccatggctgcctgcatgcacccgcctcttctcatagcagatgaaccaacaactgctttagatgtacacacgcagaagctggtgcttgagcacctaaatcaaattcgtcatgagtatggaactgccattttgctcattactcacgatcttggcgtcattgcagaaatggcagatcaggttgtcgtcatgagacaaggagaaatggttgaaaaggcagaagtgcttgagctttttgaaaaccccaagcatgattatacaaagaaactattagcagctcgtccatccatcccagctgtttgcccgatttgaggtgagaaggcccttgcatttattagaagtgaaagcagttagtcattcatacaacagccggtcgtttctgatgagaaaaaaaggcgcagaccaagtcttaagcggcgtcaatttaatcattgaagaaggcacatgcctcgcattgctggggcaaagcggcgcagggaaaagtacactaggccgcatcatacttggtctagagaaaccaagagccggtcaggtcctttttgaagggcaggatatatattgtgcagatcagcgaacacgcaaacattatcgccggcatgtgcaagcggtgtttcaagattcatattcggcggtgaatccaaggtggacagtcgaacaaattttatccgagccgcttgaaaactatgaagctatggaccgacaagaacgcaaaaacgtgttgattcactggctggaaagagtcgggctcagtgaaaaggacttgtctaaatatccgcatcaattcagcggcggccagctgcaaaggatcaacatcgcaagagccttattgctgcagccaaagctcgtcgtactggatgaatccgtcagcagcttagacatggttacacaggctgtcattttagatttattagtagaattaaagaaggaactgggtgtcgcttacttatttattacacatgatatgacggcagcctatcatgtaagtgatcaattggcgatattggatcaaggtgaacttgttgctcaatttcaatcaaaggatgatttcttttcatcagaagagacagcggtgcagaaaatgagagatgcaatgctcgcagaccatcctttgtcccgaacaattggcagaccggttcggtaaatcttcatttcatcaacgcctcttttagaagaggctatttttcatgaaaggcaggtggcatcgtgaaccatcgagcgtatttagctttggccattcctttaaccatctcaacgatgaccaccccattacttggagctgttgatacagcagttgtcggtcagctcgccaatcccgcttatattggaggcgtcgcggttggcagtctcattttcagtacactatattggctctttggttttttgcgggtgagtacatctgcttttgccgcccaggcaaacggggcgcagagtgaggagcagggcgtacttgcttttctaagaccttttttaatcgccatcattgtcggcctttgttttattgccctgcaatggccaattattcaatctgcttttctagtgatttctcccgctgcggatgtccggcaatttgcagcagattattttcatattcgtatttggggtgccccgtttaccttgatgaattatgtgatattagggtggctgatgggaatggcaaaaatgaaagaagccctctctttacaaatcttgatcaatgtcatgaatatggtccttgcccttctgcttgttcatgtgttttcgtttgcagtcaaaggggtggcggctgcgacattgatatctgaattaaccgcctttgtgctaggcgcatggatcatcatgaagcattcaaaaaacgggttccagataccttctcttaagaaaatcatggatacacaggcagttcagaaaatgtttcatgtgaataaagatttgtttattcggacgatttgtctgctagtggtgattaacatgtttacagcaaaaggtgcttcttttggaacagagatgctggcggccaatgccatcttatttcaaattcactacatcatggcttatttgttcgatggttttgccaatgcatccagcatccttgtgggcagatcagttggtgcaaatgaccgtaccctttatgaaagaactttaactctttcgagacagtgggcacttgtcatggcatgcgtcattgcgtcggtttattttctcttaaaagagccgatcctgagcttgtttacaaatcttccccggcttcttgatgtgacattaggctatgcagactggctcgttctctatccttttgccgcttgtttcggtttggtcatatacggcgtatttacaggtgcgacagaaattgcccctgtcagaaattcgatgctgtttgcgatgatcttgtttatcgttgttcaagcagcggtcacgcctatttggcacaatcacggattatggtttgcctttatcatctatactaccggacggtctgggtttttgatgatgtacaaatcaaggctggatcagaagcttttcgcaaatgaaaaacaccctttgccatcatgacaaagggtgctctttttcattcattcattcgctttcttttttcactttttgatatgcttcatcaagatgctgaatacgcttcaagaccacagcgtttttggtcagctggtcttgtacaagtgtggacaccactgagcggtaataggcattcatggcatgaatcttgtcttcattttgattcatggcgatgtgctgtttcaagttgtcaacaaagtatggaacggaaaaaagttcagacatgggaatcactcctatttcgtatatacggtccgtcaatcttcatgtaaaatgatgagagggaggggagacaatgagccttaatctgcaacaagaacaagtattaaagcaggtgctcacacaagaactcaggcaggccattacgctgctccagctgaatagcgctgagcttggcgagtatcttgaccagttagcgcttgagaaccctctgattgagcggaaagacacggacagctatcaaccagtttatcataaaaaatctcaagatctaatgacagagccgtatcgaacgcatcaaaaagaaagcctgcaaatgtatttaaagaaacaagctattgatttgaatctaagtgaaaagaatcaaaggatctttgactttatgatcgagtccattgattccaatggctatttaaatgaaccggttgacgagatggcagctgtcttagaggtgccagctgaagaagtagaagccgtccttcatcagcttcaatcgctagagcctgccggtattggcgcaagatcattacaagaatgcattctgcttcagctgagaagaaaaaaggagcgctggtatgaagccgagctgatcatcgacgagcacttctttctctttgcaagaaaggcttggaaggaaatcgcggcgaaaacaggcgtttcaatgaaaacacttcaagcggtacaagatgaggtgtcgcagctggaaccaagaccgggcatacatttctcatatgaagaggaccctgtgtatatagagccagatgtgacgattactgtcgtgcaggaccacatcacatttgagctgaatcagcgcgcttttccagacgttgaaatgaatgaaggatacttcgccatgattcaagaccagaagcggcatgaagcatatgtgtatctaaaggaaaaagagcagcaatacaattggcttgtccaagcgctgaagcaaagaaaacaaacgatgacccatgtcgttcgtgagattatcttccatcagacagattttttccttacagggaaacataaaatgaaaccgcttacgatgaagcgaatcgcagatatattgcaagtgcatgagtcaacagtcagccgaacggtgaaagggaaaatggtgcaaaccccttatggtctcatggaaatgaaacaatttttccaagcaaaactagaaggaccttcgctggaagaggcgtccagctacacagtcaagacgcacatcgcagagctgatccaaacggaaaataagaaaaaaccgtattcagatcagcaaatgatgacgcagcttcagcaaacctttggtatccgtgtgtcgcgcagaaccattgcgaaatatcgtgaacaaatgaatcttccatcatctacactgcggaagcgctatgattaaaaagaagtacttgccagaaacaaggcaggtgcttcttttttgttgaaagcaaggcacacagaagattttttgaaaattaaatcggggagacgtctgaacggaaattttggggtaaagtataagatagggcatgagccgataaggatagacaacagtgatgaggtgagaccaattgaaatataaacaaatcaaaaccaaaaaaatatatgaagaaattgcggatgcattaatcgaattcattcgtacaggtgagcttcttccgggggaaaaattagattcggttcaagcgctctcagaaagctttcaagtcagccgttccgctgtaagagaggcgctgtctgctctcaaagcgatcggattaatagagatgaagcaaggggaaggcacgtatgtgaagcagttcgatcctgaacagctcgcattttctttatctcctgcatttttaatgaagcagcatgatgtcaggcagctccttgaagtgagaaccatcattgaaacaggtgctgttaaaaaggcggcgctgcttcggacggacgatgaccttcatcagctgcgtgatgcactcgaacaaatgaagctggcagaagcacatgaagaaattggtgaagaggcagatctcaccttccatctcgccttagccaaagcctcgaagaatgatgtattaaaggtgttaatgaatcaagtctcaaccttgttagtagaaacgatgcgggaaacgagaaaagtcgtattattctcaacgaaagcctccattcggcagctttacgaagaacatgaacaaatttacaaagccgtcatggcaaggcagccagaagaagcagagaaagcgatgcttacgcatttgaaaaatgtagaaaatctgctgggtgatgtgctgcaagaaccagcagaacagtcagatacacaataagctgtgccgaatgatggcacagctctattattgacgagaaatatgtagctttttcattcgatattgcagactttgcctgctcatgcccaataactttgcagtctgtgaaatattatcgtccattttttctaagtaatggacgatgtattgtttttcgaatcgctccatttgggtttggaaatcagtcgtctgttctgggcttgtatagacaaaggtgtcagcagcggcggtttgctgcagagaatttgtttgcaattgcgccttaggacggccttccccgtgcttaaatctaaaatgatagggaaggtgatgcatgcttaagtcgtcttcatccatcatcatattcatccccgcctcaatcacatgctccagttctcttacattgcctggccaatgatacgcttggaaaagggcaagtacctcttcgtcagccgtcttcaccttcatttgaaacagctcattatatttttgaataaaatgattcacaaacgtaggaatgtcctcttttcgctcagaaagcggcgggataaataaggtgacaataccgagccgataaaataaatccttgcgcatgcgtccacctgcgatcgcatcaacagggtcctcattcatattggcaatgactcttacatcaacagcgatttcttttgtgctgcctagccttctcacgcgtttctcctgtaagacgcgcagcagttttgcttgaagaggaggatttaatgagttgatctcatctaaaagcaatgttcctccttgcgcctgttcaaataaaccaggctgatcagttgcccccgtaaaagcccctttttgtgtaccaaagagcagactttcaatcagattatcaggcagtgctgcacaattttgggtaataaatggtccagatgaccgactgctgccgttatgaatgctttgagcaaacagttctttcccagtccctgtttcgccaacaatgagcacataagaagaggtgcgtgtcgctcgtttcgcatgttcaatcacctctaaaaatgcagggctttgtccaataatggaatcaaaggtaaagcgtgtgcttccttttttcttcatattgtgctgaatcagccgttccagcttggtcacatcatttgaaatttcaactgccccttgaatgaggccgtctcgaacgagcgggtatgtatggttaatcgttgtgatttcttttccgttgtaattatgatacgtctgcttggcatgaacggtttgtttcccggtacgaagcgcttggacaagtgtactgtgcatctcatcttgaaaggtgaagaagtcgagtacatttttatggagaacatcagagcgttttaaagactcaatctccatcatttttttattataaacaaccgtatggccattctcgtcaattgcatgaaccccgacatcaattaaatcgagcatttgtttatacaaatcaatctcattttcaagctttgcggcatgcagatcttttttcacttgtgccacctcctgacgttacctctattttacatgaaaaattttgcggtttcctctaaaaaatttggcatgcgcaaagaaattttgcgtaaataatgaggtagaccctcatgatcaagcagtcagaaagttggcacgatccttgcataacatatggatgaagatgaacccaattgaaagaagctaccttacagaaggaggaatagatgatgacacagacaaatgaattgattcaacaaacagaacaatatggagcggcaaactatcatccgctgccaattgtgatttcagaggctgagggagtgtgggtgacagaccctgaaggcaatcgatatatggatatgctcagtgcgtattccgcagtgaaccaaggacatcgccatccccgcattattgaagcgctcaaaaaacaagcagaccgtgtgacactcacctcgagagcttttcataatgatcagcttggtccttggtatgaaaaaatttgcaaactgacaaataaagacatggcactgccaatgaatactggtgctgaggctgtagaaaccgctgtaaaagcagcaagacgctggggctatgatgttaagggaatcgaagagaatcgtgcagaaatcattgcgtgtgttggcaatttccatgggagaacgatgacggctgtgtctctttcctctgaagcagaataccaaagaggcttcggtccaatgcttcccggaataaaactgattccttacggagatattgaagcgttacgtgaagctatcacaccacagacagcggctttcctcatagaaccgattcaaggagaagcgggaattgtcatgccgccagaaggcttcttgaaagatgccaaggcgctttgtgagaaagaacatgtgctgttcattgcggatgagattcaagtggggttagcacgaacaggtaagatgtttgcgtgtgactgggaagacattgagccagatatgctgatcctcgggaaagctttaggcggcggcgtctttccaatctcgtgtgtcgtagcaaaccgcgatatattaggcgtgtttaaccctggttctcatgggtctaccttcggaggaaatcctcttgcgtgtgcggtgtcgcttgctgcactggatgttttaatcgacgaaaagcttgcagcacgttccatggagcttggcgaatacttcaaagacaaactatcacgcattcaaagccctgtgattaaggaagtgcgcggccgcggattatttataggaatggagctgacagaggcagctagaccttattgtgaaaagctgaagcaagcaggattgttatgtaaagaaacccatgagacagttatccgttttgcaccgccgctgaccatttcaaaagaagatttagactgggcaattggtcatattgaagcactgtttcaagcctaaatgccaaagggggaggaaccttcactttctccctttctttttcaacgaacagcgaattttgtcaaaggatgatgaatagaagaaggaaagtggggaagtggatttgaagcaagaacagcataatgaactagagcgttccatgaaaagcagacatctctttatgattgccttaggcggcgtcatcggtacgggccttttccttggatcaggattgattatccatcaggcaggacctggcggagccattctatcgtttatcattggcggactgttaatgtatttggtcatgctgtgtcttggagaattagcagtggcgatgccgacagccggttcctttcaggagtatgcaaccaaatatataggtccatccacaggctttatgatcggctggctgtattggtttagctgggcgtgtacgattggactggagtttacgtcagcaggcatattgctccaaaggtggttcccagatatcccggtttggctctggtgcctagcatttagcgtgatattatttgccgtgaatgccatctcagctcgcagcttcgctgaaacagaattttggttttcagccattaaggttgcagccatcctattgtttattatcatcggaattggcgcaattttcggaatgattcatttaaaaggcggagaaccagcccctttatttcgtcatttgacggatcatggcggactatttcctaatggtgtttttgctattttattaaccatggtcacggtcaatttctcctttcaaggaacagaacttgtagggattgcagcaggtgagagtgaaagccctgaaaaaacattgcctcgatcgatacggaatattatttggagaacgatggtctttttcgttttatcaattgcggttcttgccgcgcttcttccatggcagacagcaggcactgttgacagtccgtttgtggtcgtgctggacaaggtcggcatcccatatgctgcagatatcatgaattttattatcatcacagctgtcttatctgtagcaaactctggattatatgcatcatcacgtatgctttggtcgctttcaaaggacgggaaaggacctggctttacgaaaaagctgtccaagcgtaaaatcccgatcaatgcattattggtgacaatgggtgtatccgctttatccctgctcacaagtgttgtggcaccaaaaacggtgtatgtgtggctcatttcgatttccggaatggttctagttgtggtgtggatgtccatttgtttgtctcagtatttctttagaaaacaattcataaaagcgggtggagatgtaaaggatctcgtcttccgtacaccgctctatccatttgtgccattggcaggcttcatcgcatttggcatcgttctcatcagcctattctttattgaggatcagcggattggcctttattgcggcgttccgttcatggctgtctgctacatcatttattatttcaaaatcaaaccgaaggaagaggcaaagcgtttcgccgaagaggaaggaaccatttcaaaaacataaaagaccaactatatcaacaaaatgtgcatgcggatctcacacgcatgcacattttcaatggtgaattcattgaatatagaagaaaataaatattttgaaaagaaatatcatagcaagaaccttgatgacaagcaggttatcggtgaaaatgtgtctattttttgtctaaatgtgtttgtaagagttgaaaatgcaagattatcctgttaaaataattaaagaaagcagggattgatttttttggctgtggcgggacgttttttgtcacagtgggacgtttttagtccaacgtgaaaagaaagggtcgttagccatgaatcgtttattggaagctcaaaaaaaattattgccagatcttctcatcgttatgcaaaaacgctacgacattttgcaatacatcaggttagctgaaccaatcggccgcagaagccttgcgacgagcctaggtctcagtgagcgcatcttaagagctgaagttcagtttttaaaagaacaaaacctgctggatgtcaaaacgagcggcatgatgctgacgagtgaaggccacgctttgcttgaaatgcttgaaggaatgatgaaggacgttttaggtttaacctttttggaaaatacattaaagaggaagttaggcctagaagaagtcatcatcgtttctggtgacagtgacgaatccccgtgggtgaagcaagaaatgggaagagctgctgtccaatgtatgaaaaaaaggtttactggaaataatatcgtcgccgtcactggcggaacgacgatggaagccgttgccgaaatgatgacccctgatgccaaaaacagaggcatgatgtttgtccctgcgagaggcggtcttggggagaatgtaaaaaatcaggcaaacaccatttgtgcccacatggctgaaaaagcttccggtacttacaaactgctgtttgttccagggcagctgtcagaaggtgcttactcttctattattgaagagccgtcagtcaaagaagtgcttcaaacgattaaatcatccacgatgctcattcatgggatcggtgaagcaaaaacaatggcgatgagacgaaatacaccagctgaagatttaaaaaagattgatgagcatgacgcagtgacagaggcctttggctattactttaatcgtgatggtgaggtcgtccacaaagtgcactccgtcggcatgcagctagatgatttagaaagcattccacacatcattgctgttgcaggtggatcatcaaaggcaggggccattgaagcttatttcaaaaaaccccgccgaacggttctcgtcacagacgaaggagccgcaaaagagttattaagggagtcaattgatccctcaatataaaacattgttacctataaaaggaggaaacatcatggcagtaaaagtcggtattaacggatttggacgtattggacgtaacgtatttcgtgcagcattaaacaatcctgaagttgaggtagtagcggttaacgatctaacagacgctaacatgcttgcacaccttttacaatatgactctgttcacggaaaactagatgcagaggtttctgtagacggtacaaacttagtagtgaacggtaaaacaatcgaagtatcagctgagcgtgaccctgcgaaattaagctggggtaaacaaggcgtagaaatcgttgttgaatctactggattcttcacaaaacgtgcagacgccgcaaaacacttagaagctggcgctaaaaaagtcatcatctctgctcctgctaacgaagaagatatcacaatcgttatgggtgtaaacgaagacaaatacgatgcagctagccacgatgtcatctctaatgcatcttgtacaacaaactgcttagctccatttgcaaaagtacttaacgataaatttggtatcaaacgcggtatgatgacaactgttcactcatacacaaatgaccaacaaattcttgatcttccgcacaaagactaccgtcgtgctcgtgcagctgcggaaaacatcatcccaacttctacaggtgctgcgaaagctgtttcacttgtattgcctgaacttaaaggcaaattaaacggtggcgctatgcgtgttccaacacctaacgtttctttagttgaccttgtggctgaattaaaccaagatgtaacagctgaagatgtaaatgcagcacttaaagaagcagctgaaggagaacttaatggaatccttggctacagcgaagagccattagtatctggtgactacaatggtaatgcaaactcttcaacaatcgatgctctttctacaatggtgatggaaggcagcatggtgaaagtcatttcttggtacgataacgagagtggatattctcaccgcgttgttgaccttgcagcttacattgcaaaacaaggtctttaatttctcacactgaaggaactcacttggttctttcctagagacacgatataatgaagacggacaagggaaggggaagcatccctttccctttttctctgtttttatccgttctgcacgatttctcgttttgatgagggcaaaatgggaaaaggataaagagagacttgtccaatgcgtaaggaaaccagaataaaggaggatctcctgacgagcatgaataagaaatcagtaaaagacattgacgtaaaaggtaaagttgtgttctgccgcgtagattttaacgttccaatgaaagacggagaagtgacggatgatactcgtattcgcgcagcattaccaacgattgagtatttaacaggacaaggcgcaaaggtactgctagctagtcatttgggtcgtccgaagggtcaagttactgaagaactgcgtctgacacctgtggcaaaacgtctgcaagagcttcttggacaagaagtgaaaaaagcggatgaagcttacggagacaacgtgaaaaagcaaatctctgacttaaaagaaggagatgtgctagtgcttgaaaacgttcgtttctatcctggtgaagaaaagaacgatcctgaattatcaaaagcatttgctgatttagccgatgtgtatgtcaatgatgcgttcggtgctgcacaccgtgcacatgcatccactgctggtattgcagcatatcttccggctgtttcgggcttcctcatgcaaaaagagcttgaggttctaggaaaagccatttcaaaccctgatcgtccatttacagcgattatcggtggtgcaaaagtaaaggataaaatcggtgtgattgaaagtcttctggataaagtggacaacctcatcatcggcggcggacttgcttacacatttgtgaaagcacttggccacgaagtaggaaaatctttattagaagaagacaaagtagatttagcgaaatcctttatggaccgtgcaaaagaaaaaggcgtgaacttcctgattccaacagatgttctggtagccgacgacttttcaaatgatgcgaatacaagcattgtgccaatctctgaaattccaagtgatctagaagcacttgatatcggaacagagacaagagagaagtatgctgatgtcattaaaaacagcaaacttgttgtctggaacggaccaatgggtgtatttgaaattgatgcattcgctaaagggacaaaagcaatcgcagaagcactggcagaagcaaaagatacatattctgtcattggcggtggagactcagcagcagctgttgagaagtttggtcttgctgatcagatgagccatatttctacaggcggcggcgcttcacttgaatttatggaaggcaaagagcttccaggtgttactgcattaaacgataaataagaccaaaactgctataaggaagtgtcaatcatgagaaaaccaattatagctgggaactggaaaatgaacaaaacacttggcgaagcggttagcttcgttgaagaagtcaagtcatccattccatctcctgacaaagtggaatcaattgtctgtgcgccagcacttttccttgaaaagctaaacagcctttctaacggaacagaccttaaaattggtgcacaaaacatgcactttgaagaaaatggtgcattcactggtgaaatcagccctgctgcgctaaaagatcttggcatcggctactcagtgatcggtcattcagagcgccgtgaattcttcgctgaaacagatgaaacagtgaacaaaaaagcacatgctgcattcaagcatggcatcgttccaattatctgtgtaggtgaaacgcttgaagagcgtgaagctggcaaaacaaatgaacttgtcgctgatcaagtgaagaaagcactagctggtttaacaactcagcaagtcgctgaatctgtcattgcatatgagccaatctgggcgatcggtacagggaaatcttctacagcgaaagatgcaaacgatgtttgttcgcatatccgtcaaacggttgcaagcgaatatggtcaagaagcggcagacagccttcgcattcaatatggcggaagcgtgaagccggcgaatattaaagaatatatggcagaatccgatattgacggtgctttggtaggcggcgcaagcttagaacctcagtctttcgttcaattattggaggaaggtcaatatgagtaagaaaccagctgcattaatcatcttagatggattcggtttaagaggcgaaacagtcggtaacgctgttgcccaagcaaagaaaccgaacttcgaccgctactggaatgaattcccgcatcaaaccttaacggcttcaggtgaggcagtaggcctcccgcaaggtcaaatgggtaactctgaagttgggcatctgaacatcggtgcaggccgcattgtgtatcaaagcttaacaagagtgaatgttgccattcgtgaaggggaatttgagaaaaacgaaacgttcctagatgcaatgacttatgcaaaagagaatgacaaggcccttcatttattcggtctcttgtcagacggcggtgtgcacagccacatccagcatctctttgccctgctgaagctggcgaaaaaagaaggcttaacaaaggtatacattcatggtttcttagacggacgtgatgttggtcaaaagacagccaaagtgtacttaaaacagcttgaagaacaaatcaaagaaatcggtgtcggagaagtggcaacactttctggacgctattactcaatggaccgtgacaaacgctgggatcgtgtggagaaagcatatcgcgcgatggcgtatggtgaaggcccaagttatcaaaacatttatgatgtcgttgatgactcctatgaaaatggaatctacgatgaattcgttattccatctgtcatcacgagagaaaatggtgagccagttgcaaaagtaaacgacggcgactctgtgattttctataacttccgtccagaccgtgcgatccaaatttcgaacaccttcacaaatgaagatttccgctcatttgatcgcggggaagcacatccgaaggatttacacttcgtctgctttacacacttcagtgaaacggttgatggctatgtcgccttcaaaccagtgaatttggataacacagtaggagaagtgctttctcaaaatggattgaaccagctgcggattgctgaaacagagaaataccctcatgtgacgttctttatgagtggtgggcgtgaagaagaatttcctggtgaagaccgcatcttgatcaattcaccagatgtggcaacctatgacctcaagccagaaatgagcgcttacgaggtaaaggatgcacttgttgcagacatcaatgctgataagcatgatgcgatcatcctgaactttgctaacccggatatggttggtcattcaggtatgctcgagccaacaatcaaagccattgaagcagtagatgagtgcttaggagctgttgtcgacgcaatcctagcaaaaggcggacatgccatcatcacggcagaccacggtaacgcagacgtgctgattaccgaagaaggaaagccgcatactgcacatacgacaaaccctgttccagtcatcgtgacgaaaaaaggtgcaacgcttagagaaggcggcattctagccgatctatctccaacgcttttagacttacttggtcttgaaaaaccaaaagagatgacaggaacatcattgattcagaaataaaaaaattgattcaaaaggagagaaataacgatgccatacattgttgacgtatatgcacgcgaagtattagactctcgcggtaacccaacagttgaagtagaagtttacacagaatctggcggctttggccgtgcattagtaccaagtggtgcttctactggtgaatatgaagcagtagaactacgtgacggagacaaagaccgttaccttggaaaaggtgttctgacagctgtaaacaacgtaaatgaaatcattgcaccagaacttttaggctttgatgtaacagaacaagtagcgattgacaaaatgttaatcgaacttgatggaacagaaaacaaagggaaattaggcgcaaacgcaatccttggcgtatctatcgctgtagcacgtgcggctgctgatttcttacaaattccactttaccaataccttggtggattcaactccaaaacgcttccagtgccaatgatgaacatcgtcaacggcggagagcatgcggataacaacgtagacattcaagaattcatgattatgcctgtaggtgcaccgaacttccgtgaagcacttcgcatgggcgcacaaatcttccatagcctgaaatctgtattaagtgcaaaaggcttaaacacagctgtaggtgacgaaggcggattcgctccaaaccttggttctaacgaagaagcacttcaaacaatcgtagaagcgattgaaaaagctggtttcaaaccaggtgaagaagtgaaacttgcaatggatgctgcatcttctgagttctacaacaaagaagacggtaaatatcatttatcaggcgaaggtgttgtgaaaacatctgctgaaatggttgactggtatgaagatatggtatcgaaatacccaatcatctcgatcgaagacggccttgatgaaaacgactgggaaggtcacaaactattaactgagcgccttggcagcaaggttcagctagtaggagatgacttattcgtgacaaacacgaagaagctttctgaaggtattaaaaatggtgtcggtaactctatcctgatcaaagtaaaccaaatcggtacattaactgaaacatttgatgcaatcgaaatggcaaaacgcgcaggatacacagcagtcatctctcaccgttctggtgaaacagaagacagcacaattgcagacatcgctgttgcaacaaacgctggacaaatcaaaacaggtgctccgtctcgtacggaccgtgtggcgaaatacaaccaattacttcgcatcgaagatcaattggctgaaacagcacaatatcacggcattgcaacattctataacttgaataaataatgccagctacgcgctgcgtcccgctctttcatgagagcaggacgcagcgttttttttgtgttgagcgaaatccgatagctaattcatttgtcttatcctatttttgtaaaaaatcctccttcagttagagaagcagtcaaaatcccctccatttataagcactaaatcatgaaaaatcgactaaaaatatgatctgaaatgaacttatgctttctgtaagggggtggtatcattttacatatattagggggtgatgagatgctgaatccttttagccttcgttttccagtaggtgtgtatatgtatgtccttcacctactggcggcctatgatgaaaggaagcaacgaattctaacttctaagaacatacagaaaaatgcattttggatttatgtccttgccgctattttaggtattgtgacagtcgcagcattgatttgggcatgcaagacctttggaaaaggctctaaatttttaggcgaattcaagttcttaggcatgtacgtgaaaatcaaatgcggtttctaacagggatgagaacagatgcgaggtcatctgttccatctgaaacaaacggaggaatatgatgctgacattacaaatacaagaaaaaacgtatagccgcaccttctctctccgccatatacaaatgaacgtagagaaaggccgaacgatgcttcttttaggacacaatggtgcaggaaagacaacaatgatccaagctatgtttgggctaacgccatttactggctctgtttccttacatggtgaacagctgaaccttcaatcctcagcacatatttccctattgaaaaaacacgtttcctatattcctgacgaacatgcgttgttcgattatttaacaccgagggaatactttcaattacttcagctgccacatgagcaagatatcacacgtgaagagacattcatcgatttgtttgagctgagtccgtatatggatcagccaatcgctcagctgtcccatggcaatcaaaaaaaaacacaaatcatttcgcagcttctcaggccatgtgattattatgtgttcgacgagccaacgaacggacttgatccagatatgatgattatcttaaaaaaggtgctcatgaagctgagagatcaaggcgctggcattctgatatcaactcatcatttgagctttggtgatacattatatgatcatctcatgatcttaagaaatggtgacgtcaagctgaatatgtcccgccaagagacgaatgagacatttcctcatcaggcacttgaagagatttataaagaagtaaatcgagattactatatgcatgtggagaggttactcaatgatttggacacgacacgttcttcataaaatagaatggggcatgctgacagcgaaaggaaagcagcttggaaaaaagtatcctttgcagcttctcgcagctgccgtttttctcttgctgatctatgcgatatacgttgtcatcagcctgcgcttttacatgcaggtaggtgaaagtgagccagctacgctatacctccaatttgtcaaaatgtcgctcttactattaggagcagggattgtgttatcccggaataaactgaagcgccaagaatatcaattctactttttgaacagcgcgatacaaagtgtatcctttgtcctttgtgcgtatttctttccagttcttttttgcttcctcatggctggactgctttttttaccgattatattaggtcttttgatcacgggtgtcactccatctctgtattggatcatcgttgtctgcatcacatgttgcatattggcactttatacggtctcttcatggatgctgctgcggatcggtgtgagccatttcgtatcaaaaacaaaagagcatttgctgcttcaaacgatcggctttgcggcgcttcatgtactaatatttctcctttttcaaaaagcggtggagatgatccatgtatggccggctgtctatctgttgttacttgtcatcatcctaagcgctggatggctatgggtgaagggtttagcagcttgctatgttcatcagatgtttttgcagctgaaaaaagaggtgaagtcgttttcctaccagaaaatcagaacgcactcttcctttctgacgcatctgcggcaggaattggtctatttcagccgatcagctgtttttaaagagcaaggcattttgtttctctttctcatttgtttgacggtggggctgccatttgtttttaccccggcagaaactggctggctgtatgcctttattgtgcagtttgcgttaaaggaaatattgatcatgcttccgctgatgattggcagggaatatcatatcaatcaaagggccatctttatgttaaatacatcaaagggcgcttatttaatgtcgagaatgttattttattacaccattaatctgctgacatattttgtgtatattgggcttgcctatttggtgatcggtattgaaagtgaaggtcatggattggcgagtttgtccattttattgattaccgccatggcggcctgtacagggtttgtcgtgaaaatcagtgattttaataagctgtttgtgatcgtgttgatgattgctgtattcagctttatcgatatgcttttattagaatggctttcatctgatgtatctcttctcgccaccgcttatctgcttggttcacttgcctttttcagttgtatatatgctgcgatgttaaaaaggcctgtattgcgatgatggggcttgtcattagtttactagcggttgtgctcattcacgaactcggtcatatgttgatggtcatggtgtgtaacaaattcgaaaaaagacccctttttgattttgtgatgatgattgattggaagcaagtggcgatcgtccatgagacatttgcccggccgagctttaatctgatggtggcacttgcgggtccgctgtttcctgtgctctgctcgagtatgctttttttaatgtggaagcatccggtgagtcatcagctgctgtttttttctttactgaacactgtgatgctgcatccagcttgcccagacgggaaaaatatcacagccagtttaaaagagatgaaggagagaaaaagatgatcaaagtatttcattcgttttctagcggcttaacacttgcgatgctgtatatatttgctgtgtttatgacccctgtctttttactgctgctagaggtcaatcatgttgaatcaagtccaacactgtttggtatgccattttatatcatgaaaattgaagagtatcaattcagctcagaggcgacgctttttggatgtgttgtctgctttttagctggcgctgtgctatactttttcattcaatatgtgattcaagctgtgaaaaagcgaagagcataaaaaaagcaggctgagcaaatagtcagtctgcttgaaaagtgagagacagccgtaccatatccatacattgaatcccgttttcataaatcggttcatcataatgcttaaggaagaaatcgcgatcgatcgaagtcaggcggaagccgcatttttgataaagtgcgagctgctgaatactcgagttgcctgtgccgatttcaatcctatggaaaccagcggctttcgcttcagcgatcgcatgacggatcagctgtttcccaattccctttccttgccatgactccttcacagcaacattcatgatttcgactgtatgctgaggtagcgatgatagcacataaacaccaatcacatcctcttcatgaaaggcggcataacaagagccggattgcacatacgcgagaacctttttctttgaaggatcagctaatagtaaaagatccatagggagagattgatcatgagataatggtcgaatctgtatcacattttttcatcctttctattctttcatatacccttgtttcacgccccaatcatattggtcctgtacccacctgagagggagggtgatgagtgacattcgggtcttttttgacagttggttttcttgtagcctgtgcggtctgcttattcgcttgagcagtagcttttgctgctgccagctctttttgaagctggtcgacttttatctcaagcgctttacgctgtttgacctctttttcataggctttcttttcttttttgagcttttttgtgacggtggctatttgctttttttgttcatcgttttcatgcttcatatccgtttgatctgattttaacttcgaaagctgcttagtgttcgttttgctttcttgctgatgtttttcctctgctgctgccaaacaatccagccagctgcgcctaacaccgcaacagacagaagaatgatcgtaatggttttttcaagtgtgaacccttttctttaaacctctattatcatcggttaaagataaacaggttttaacatcaaagggaatattcacatcagtttggcagacactatgaaaaaaggagggtgtctgttgatttcctttatgattcatgttgtggtctcattatttgctgtatcaaaccccattggaaacgtgcctcttttcatcaccttaacagaaggctatacagagaaagaacgcgctcagacagccaaaaaagccatcgtggtctctttcattattttgattgcctttctattggcaggcaggctcatattcaaattgtttgggatcgatattcatgcactccgcatcgccggaggtatttttatttttggtatcgcttacaatttgctgaatgcaaaagaatcacacgtccaaaatcctcattcggaggaaaaggcagaaagcaaagagaaggcagatatctccgttacgccgctggcaatcccgatcatcgctgggcccggtacaatcgctacagtaatgagtttaaccccgggaagtcaagggatgctccacatgttttcgattctaatcggcattatcattgttcttgccatgacgtattatgcctttcattattccagtttcattatgcggaaaatggggaaaacagagatgaatgttgtgacgcgtttgatgggattaattcttgctgtagtggcagttgagatgatcggcgcaggcttaaaagggatgtttccgatgtttatgtcataagtgtatataaaaaagctgtttttttctacaatgatgtaaaataaaacagctttttttaaggtttcggcacatgcttaaatacttcttcactttcaaagaattcaattaagcggctaatccaatcatagtaatcaagactttccttgatttctgaaagaagcagattgattttatcctctgtttcttcaggtaagtcgtcctgttcaagcagctcttgcaattccttgcacgttttcttatgtgctttacggtttttgctgacaactcgggaccaattggctgcaaacaatgaaataaacgtttggtattgatcttgctcaacgtcataaagatctttacgtattcctttttcataaaccttttccgcaatattcaaatcgagcatttctcgaacgacttgactcatcctcgttttgctcatgccggtcgcctctgatagctcttccagcgtcattggtttacggttcatgtgaatgataccaagcactctacccactgtagaagaaagaccaaaggcattcatgttctccgcagctttttcaatataatgatcctgtgctttttgaatggcgcctaacgcttgcttgtccactccccgcttcatcccttcacgactgacaatttgtaacacaatatatcatatacctgtttgttgatgaaaacaataaatattgagtaattgctagtaatttgaaggaaaaaggagagatctctagatattacagcgttaactgaaaattttatataaatcttatgcaatacaaacacatcataaactttttattttataaagtttgcactataatgaataaggtgtaaattttctgaatatatagatccaactaattggaggtgtctcatttgctgaaactagagaatgtatctaagacgtataaaggcggaaaaaaagctgtcaaaaatattgatttagaaatagcaaaaggagaatttatttgttttattggaccgagtggctgtggtaagacaacaaccatgaagatgatcaaccgactcattgaaccttcctcaggaaacattttcatcgagggagaaaatattatgaaaaaagatccagttcaattaagaagagaaatcggttatgtgattcagcaaattggactgttcccccatatgaccatcgcgcaaaacatctcacttgtgccgaagctcttaaaatggccggaagaaaaacggaaagaacgagctcgcgaactgctgaagctcgtcgacatgggcccggaatttttagagcgctatcctcatgaactcagtggaggacagcagcagcgcatcggagttcttcgcgcactggcagcagaaccccctctgatcctcatggatgaaccatttggtgcacttgatccaattacacgagatacattgcaggaagaatttaagaaactgcaaaaaacgttaaataaaaccatcgtattcgtcacacatgacatggatgaagccattaaactcgctgaccgaattgtgattttaaaagatggagagattgtccaagtaggcacacctgaagatattttgcgtaaccccgccaacgagttcgtagaagaattcatcggaaaagaacgcctgcttcaatcaaatccgaatatggaacgtgtagaacaaatgatgaacacgtcaccagtcaccattacagtcgaacaaacgttgactgatgccatctacatcatgagagaaaagcgggtcgattccttgcttgtagtagatgaacatcatgtgctaaaaggctatatcgatattgaaacaatcgatgcgaaccgcagaaaagcggctttcgttggtgagatcttaaatacagagttctatactgtacaagaaggcgcacttctaagagacaccgttcggaaaatcttaatacgcggtattaaatatgtaccggttgtggatgccaaagggcatttaaaaggcattgtaacacgggcaagtcttgtagatgttgtgtacgactctatttggggagacgatacgccggcgtctgccattgaaatgaactaagggaggtggacacatggatcaaatcatcgattttctagagaaaaatggtggggaactcctcacaaaaatgtgggagcatttatatatttccttaattgccgtcgtgctaggaattatcgttgccgttcctttaggcgtcgttctcacacgaatgaaacgaggcgcaggttttgtcatcggtgtcgtgaatatctttcaaacactccctagtttagcgattcttgcattttttattcctattttgggggtggggaaaatacctgcaatcgttgctctctttttctattcggtattgcctattttgagaaatacgtatgcgggcgtccaaggtgtgaacaaaaacttgcttgaatccggtaaagggatcggcatgaccacatgggaacaaattcgtcttgtggaacttccgcttgctgtaccgatcattatggcaggtgtccgaacgtcaacgatttatttaattggctggacaacacttgctgcttttatcggtggaggaggtcttggtgactacattttgattggacttcagctataccagccggaatacattattgcaggtgccatcccagtcaccattttagcggtcatcattgactttacattgatgaagctggagaaaaaagtaacaccagaaggcttaaaaggattgaaggaagtttcataaggagttggcttatgtgaagaatcgaaaaacaagatggatcagtgcactgcttgccggatgcttgctattgataagcggctgttcacttcctggactagccggctcctcaggcaatacgctgcgaattggagcacaaaactttaccgaatcagaaattatggcctacatggttagcgatatcatcgaacattacacagataaaaagacaaccattgtgaaaaacctaggctctaataccgtacagcagaaagcaatggaaaacggagatatcgacatttctgccacaagatatacagggacagatttgacgagtacgcttggaatggatgcggaaaaagacccggagcgtgcgatggagatcgtccaaaaagaatttaagaaacgctatgattacaaatggtttgattcctatggctttgataatacgtatgcctttgccgtgacgcaaaagatggcgaaggaaaacaagttagaaaccgtctctgacttgaaaaagaatgcgaaaaattaccggttcggtgtcgataatatttggctcaaaaagaaaggcgacggttatgaaggattcgtgaaaacatacggaattgaatttggaagcacgtatccaatgcagattggtttagtctatgatgcattaaaaaatgaaaaaatggatattgtgcttgcctattcaacagatggacgaatcaaagcctatgacctcaaaattttaaaagatgataagcggtttttcccgccatatgatgcatcgccagttgtcccggaaaaagtcctaaaagagaacccagggcttgataaggtgatcaacaggctgatcggaaaaatcgatacagagcaaatgcaagagctgaactatcaagtcgacggggagcttcaagaaccagccaccgttgcgaaaaatttcctgaaaaagcacaattactttgagtaagatggggaggtgtcacggctgatggacacactgcagcaattatgggcgtattatcagcagaacggttcatatgtgttagaagaattttatcggcattttctcatgtcagcgtatggggtgctgtttgcggcgattgtcggaattccagtaggcatctttgtggcgcattaccgtaagctgagcaattggatcttcgccattaccaatgttatacaaaccataccggcgttagcgatgctttccgtgctgatgcttgtattaggacttggcgcaaatacagtcatcttatcactctttctgtattcgcttctgccgatcatccgcaacacgtatacagggattgtcagcattgaacatgcttatttagaatcgggtaaagcgatgggcatgacgaaatggcaagtgctgagaatggttgaattaccgcttgctttatcggtcattatggctggtttaagaaccgcccttgtcatcgccatcggcattacagcgattgggacatttgttggtgcgggaggtctaggtgatatcatcatcagaggatcaaacgccacaaacggaacagccatcattttagcaggtgctattccaactgcgctcatggccattatcgctgacctagtcatgggctggctcgaacgctatttaagcccaactaacaagaaaaaagaaagaaaagcattagctgcaaaaaacatcacatctgcttaagcggttaaaaagacaaaacctcccttacatctgtaagggaggttgttttatgatgatcaggcgattcacatgcaggtgttttatgatgatcaggcgattcacatgcaggtgttttatgattcaagcgtgatccattcagaggaccacttcgaaatttcctcaaaaacgggtgcaagggaacgccccatatcagttaaagaatactcaatgcgcacgggtgtttcagcaaaaacctcccgttttacaatgcctgctgcttccagctcttttaatctctcagataatactcttccgcttaaatttgtcagagcagcctcaatttcactaaagcgctgcggacctgagagaagctgaaaaacaatcagtgcaacccagcgtttactcaataactcaactgctttttcaaaccgcgggcacatgtcagattgattcatctttcttcactccaatctgaactcattataccgtaaatctgtcataaatcagctcgaaaagcttgtcaatgctcaaaacattttatgatgacgaacggctgtttaacataaataacagatagcggttaagatcctctatttcttttttcgaaagagttgaccaaatgtctccatcaaatatttcgagatcaccaagttcatatagcgctgcagcttcctttattttggataatgccatttcctcttccttcaactgatggacagaagaggcttcctcaatatagcccgcagcctgcatcatttcctcataagggacctttaatgcaccggctagttttttaatcgtaggaggctttggaataccgcgtttcccgttttcaatacgagaaataccagcagcgctgacctctgaatacatcgctaattggttcactgacagcttcttttcctcacgtaatgctcttaaatatgcaccaaagttcatcaaggcaaaacctcacatggttatagattagatatgtctattttatctgatttgttgactattggcaacaagtataccatgaaaatattgacattagttaatagtggatgtacattaggtttatgccccgctatttgttcgcctttttttggttgatgagcgtgagaaagtattcattcagctggctgatgtcttgtgcggagagcctttcccatttgtccccatcaaaaatgggaagatgttctacatccttttgaagcgccgtttgatagattttcaacatggattcatattttggtttcatttcatgaacttgctcctgttcgatatgaccggcaagcagcattaaatcctcataaggcaccttcaaggcatgtgctaattttttgatagtcaaaggttttggcacaccgcgctttccattttcaatacgagaaattccagcagcgcttacacctgaatacatggcgagttgattgacagacatttttctattttctcttaaaatgcgtaattgttcaccaaagtgattcatgacatcgaacctcacatttcagtatatgacttattttagtatgatcattgaccaaaggaaatagcagaggggtaaaagtgttgacttaagttaatagatctgtttcatgtgagcaactacacgttgtacatattgattccataggaggttgtaatgatggtcgaaaagattcagatcaggcgggcttttgtcatgcagtatatgatcgaaaacgatatgtctttaaatcagctcgctgatgaaattggcatttctcctgccacactcagcagggtattaaatggtcaccggaaaccaggccagcttgtcattggcaaaatgattcattactttgataaaaaatttgaagatctattttactatgaagatattgacaaaagtcaacgaatgaaatgatcaaggaggcaatgtcgttgaaaagaactgggatggtcagacatattgattcactaggcagaattgttctgccttcagaaatgcgcaaggtgctcaatattaaagaagagcagctattagaaattttcattgaagatcaaaccattatgctgaaaaaatatgatgcagataagagctgcctgttaactggacaagtgacgaagtataacaaaagctatggaaatgggaatgtgatgctgagtcctgaaggagctgaacgtttgttagtagaattaaaacagctattgaaagaagaagcaacccgttaaaaacgtatttttaaccgaaaattgcatataaaaaatgctgcatactactctttggaatgaaattgaatcaaaataacgaataaagtcgacaatatagagggaatctttattttgatgtttcgtgacatgcaccttgttttcatgtaaaataaagttatgtgtaccagtttgtctggaggtgttttcatgcacgcatttgttatcacattactcgtaattgtcagtatcgcacttatcatcgttgtattgttacaatcaagtaaaagtgctggactgtcaggcgctatttcaggtggagccgagcagcttttcggtaagcaaaaagcgagaggccttgacttgatacttcaccgattaacggttattttgtcagtgcttttcttcatcttaacacttgcattggcatatctaggcgtgtaaggcgcgagtaacagaaggtctgatcttttttcagacctttttttattatcagcactcttttgtgtttgtttcatacatacaagtggaaaatataaaccatatcagaaggaaaggaagtcacatcatgaaagttgttacaccgaaaccatttacgtttaaaggtggagaaaaggcggtgcttcttcttcacggttttactgggaatacagccgatgttcgaatgctaggccgttatttgaacgaaagagggtatacatgccatgcacctcaatataaaggacacggtgtgccgccagaagagcttgtccaatctggcccggctgactggtggaaagatgtagaagaaggctatcaattcttaaaagatgaaggctatgaggaaattgcggtttgcggactatccctcggaggagttttttcattgaaattaggttacactgtacctgtaaagggaattgtacctatgtgtgcacctatgtacataaaaagtgaagaagtcatgtaccagggtgtactagaatatgcccgtaactataagaaattcgagggtaagtcagaggagcagattgaacaggaaatggaagagttcaagaaaacgccaatggatacactcaaaagcctgcaagaactgattgcagatgtcagaaacaatgtcgacatgatttattcacctacttttgttgttcaggcacgtcacgatcatatgattaatacagacagtgcgaatatcatttataacgaagtagagacagatcaaaagcatttgaaatggtatgaagaatcaggccatgtgatcacgcttgataaagagcgtgagaaggttcatcaggatgtatatgcattcttagaatcacttaattggtcaatttaaatatatagggggttagagtgtgcaaaaagaagaatttatggatgaattactcgcttttatgaaagatgaagcttataaaccgttaaccgttcaagagctggaagtgatgatggagattaccaatcctgatgattataaagagctcgtcaaagcacttgtgatgctggaagatcaaggactcattgttcgcacgcgcagcgatcgctacggtgtaccagaaaaaatgaacttggtaaaaggaaagctgtctgctcatgcaaaaggttttgcatttgtgacaccagaagagtttggacaggatgatattttcattccgcctaatgagctaggcacagcgatgaatggtgatacggtcatggttcgtgtcagccacaaatcaaacggcacaaaaaaagaaggaactgtcatccgaattttggagcgtaatactcagacggttgtcggtacctacacagaaacgaaaagctttggctttgtcattcctgatgataaaaaaatcacaaccgatatcttcatcccgaaatccgctaaaaatggagcggtcgaagggcataaagtggtcgtgacgctgacaagctacccagaaggaagaatgagtgcagagggcgaagtgactgaaatcctcggtcataaaaatgaccctggcattgatattttatcgatcattcataaacacggcctgccaggtgagttcccagaagaagcgcttcagcaggcagtagacacacctgaaacgattgatgaaaaagacctggaaggcagacgtgacttgcgcaacgaaacgattgtaacaattgacggagcagatgcgaaggacttagatgatgccgttacggtgcaaaagctggatgatggcaaatataagctaggggtgcatattgcagatgtctctcattatgtcacagagaactccccgattgatcaggaagcttatgagcgtggaacgagtgtgtatctcgtagaccgcgtcattccgatgatcccgcaccgcctgtcaaacggtatttgctcattgaatccgaaggtcgatcgtctcaccctgtcttgtgaaatggtcatcgatcgaaatgggaaggtcgtcaaacatgagattttccaaagtgtgatcaaaacgacggaaagaatgacctattctgatgtgaataagattttagtcgaccaagacgaagagcttttagacaaatatgagccgcttgtgccaatgttccaagagatggagaagcttgcagagattcttcgcgacaaacgaatggagcgcggagcagtagactttgatttcaaggaagcaaaagtgcttgtagatgatgaaggagcggcgaaagacgttgtcattcgtgagcgatctgtcgcagagaaattaattgaagaattcatgcttgttgcaaacgaaacggttgcagagcatttccactggttgaatgtacctttcatatatcgaattcacgaagaaccaaatcctgagaagcttcagcgctttttagagttcgtgacaacgtttggttacattgtgaaaggaacgtcgacaaacatccacccgcgtgcccttcaaagtgtacttgatgctgtgagggatcaaccagaagaagttgtgatacaaaccgtgatgcttcgttcgatgaaacaggcgaaatatgatccagaaagcatcggccattttgggttatcaacggaattctatacgcactttacatcaccgatccgccgttatccggatttaatcgtgcatagactgatcagaacctatttgattcagaaaaaaacagacgaagcaaccttagaaaagtggggccagctgctgcctgaaatcgcagatcatgcgtctactatggagcgccgttcagtcgatgcagagcgtgaaacagatgacctcaagaaggcagaatttatgcttgataaaatcggtgaagagtttgatggcatgattagttccgtgacgaacttcggactatttgttgaactgccgaatacaattgaaggtcttgtccatgtcagctacatgacagacgactactatcgctttgatgaacagcactttgccatgatcggtgagcggacaggaaatgtctaccgtatcggtgacgaaatcactgtcaaagtggttagtgttaataaagatgagcactccattgattttgaaatcgtcggcatgaaaggcacccgccgtaaatcgccaaaagattttaagttcaaaaaacggacagattcaccagcgaaaaaaggacgcggaggtcaaaatgcctctggggataaaccaaaggaagataaaggcggaagtgactggttcacaggcagtaagaagaaaaaaaagaaaaaacgcgtatttgataacgcgccaaaacaaaagcgtaaaaagaaaaagtaacgtgccaaaaagcaaatagggcgtcacgctctatttgctttttgaccatatggcgtcagcattgtcgaaagctggattgtttgataaaataatccgtacgatttggaccgtgtttgtgtcaaaaggagggtgtacgccaatgccaaagggagagggaaaggttgtttcccaaaacaaaaaagcaaatcatgactattttatagaagaaacgtatgaagccggccttgtgttacaaggaactgaaatcaaatcgattcgtgcaggaaaagtgaatttaaaagattcctttgccaaaatcgagcgaggagaagtgtttcttcacaacatgcacgtgagcccatacgagcaggggaaccgttataaccatgatccgctgagaacgagaaagctgctgcttcatcgcaagcaaatcagcaaattgattggtgcgacaaaggaagagggctactcactcgtgcctctgaaactctatttaaaaaatggctttgccaaagtgctgatcggaattggtaaagggaaaaagaaatatgataaacgtgacgatctgaagaaaaaagatgcaaaacgtgaaatcgagcgtgctttccgtgatcgccaaaagcaattctagattcatgcagatgtcttgctgagagcggaagcattatgctacaatatgttatgcagtaaacaatcattgcttttcttacagaaaccaccagttgtttcaagcgaagatattgttataatagttatatacggaagcagttaagctgaacgtttccatcccgtatatcccttttacaaggggacgttacggattcgacagggatggttcgagcttaggctgcgagccgagaggcgatctcgttaacacgcacttaaatgtaactggcaaaactaaaagttttaaccaaaacttagcactagctgcctaataagtgcagcgagctcttcctgacatcgcctatgtgtctgtgaggagcccaatgaagtaggctacgcttacgtttccgtctgaggacgtaagaagagatccatcagactagctctccaagcgcccgtcagcaggcatgcggatgagtgaacacgaaatatgttgactacgctcgtagacgcttaagtaatcgatgtctctggacgtgggttcgactcccaccgtctccatcaaaacttttagaatgcagtcgggtatcaagggtttgaaagcccttgatacgggtttggcatcattttagaagttccaaaactctatcattatttttaaaaggcgctattttttgagcgtctttttttatgccctttaatagatccatcacttgatttgacagactttgtgaagcgtatgtcggagcagaatctaatggtgcagtttatagaggagcaaaaaatgataaatatttaattacttcgctaaaaacatccttaatcattgtggtgtattgagattccttaattgttcagggctttatgttggtcgctcaattaatggtttgcacgatgcagctctcttaaagcctccttaatagattaatttgtcactcaaacattgagcactttaattatgttataatatgatatctttattgccaaatagaaattttatttaaaaaatgtatgtttatggatcttattagatttaaggtttagccaagaaacatcattattctataagttgaggtgaaagagatgtcagtcattatatcaacagacgatttagagcatgtttgtcctaattgtaatggaacaagtcatatttctattaagaacgaagaaaaaatatgcccaaaatgtgatgggaaaggtgttatcctaactgctttaggccaaacattacttcattttatgaagaagcatatacgcaattaattcaaagagattctgtacaaagacaagaacaaagttaaaccaactgtttgtttaataatggaatattgttcaagtctctttatagtttaccctgcggaaacaggtaaatggtattttttattaattattctgttaagataagcatttttctgtttatctttttttagacagaaaaacaagattattaactgcgttttttgaaaatttaaacagggtaaatacataaaaaagaaaataatttttaggaggacgaaatgttagaagtaaaaaacataccgaaaatagaagaatgtttcgaaagttctatcaatccttatgttaaaaaagtacatgaagacacagttaattgggctaaaattaataatttaatgaatgattcaaacataaaaagatatgaaagacaaaaaatttcatacttggcaggacgttctcaaccttatgactcttacgacagtgtaagattgtcttctgattatcttttattgttttgtatattggatgattatagcgacaatttgaacaatcaaaagttatatgatatatattctaaaaagataattgaaattcttaatgaaagagcattttatgatgatgatacttttttatatgcgtggcatgattggtggaaacgtcttagtataggaatgcctgatgaatggaaaaaaagaattattcaaagtattcaaaattgttttaattctattaaatgggaaattaaaaatgaaaaagaaaagtacataccaactcttgaagagtacgtcaatcataggatgcatagtgggagtgtttttgtctgttttgatctaatagaaagaggagggagaagttttattcctgcttctagtcgtagtattttactgagagatttaattaactctatcaataaaatagtaaattggacaaatgatttattatcttttaaaaaagaatttgagaatgatgaaattcataatttggttatcattctgcaaaaacaagaaaattgttcaatagagacagctttagatagagcaaaggaaatgttaaacatagaaattaatacattcattgaacttaaaaataaagtctttatcagtaatgagccttttgatagtggtatgattaaattcatatctaggttggagaatggtgttcgaggacattatgaatggagtatgaagactaaaaggttctaatttattattcttaaatgataattgctacccttatagtgctattaaataaaaatatatactgtatatttatgatgactattacccctcattatatatgtggctccgctttataaaaagaggttatattatgtttaatatgagggaggttttgtacgactaatatatcaaaacgttttagatccattgcttcatgataaggaacagggtcgtggatatttattgatgttgtttgcatttctttaagttggggtgaatcggtttaaaagaacgtggcctctaccactagatcaatcggcatagcatagaatattgatgtttttaggtttgagcatcaatgaccccgttccttatcatttggcatcgccttactcgatttaaagatacaacgattttccaggacattttcattgagattattcttcaagccattaatcggaataatctagcaatacaaaatcggctctgtgttgagaaggatttctagagtggaatatgagaacaacaccttgctttaacgagaaatttctctattataaaatggatggaattaagaagaaaataagactgacgagattttctcggaaaacttaaagatgccgatagccagcatctttttttaatgtattggtcaacttatgttccccgaaacaactgtaaaaatcgaattaacaaaggacaaacaactataatagcaatgatgagtaagagctgattagataagagttccacaaacgttgtttgaatcacataaactgcaatcagtagtaaataactcaccaaaaatatcaacccagaacttctcttctcaaatggcttctctaagagaatcagcataaatagccccgccataataatcaaaaaagtcatataccttgtaagcctcctcgtcattgatccccgatttccacattgtacagatatttcacctaccgcaacatacttctccctcaaattaagcaaaaagtagtgaaaatataagggatcacgaacagataacgaccgaaactgtacaaaaaacctccaaccaaatcaaaatcacatcttcccatttatgacgtcctcatatatagtaagattagactagttctaaataactgaaattggggcgtttacatggattcgattgttttacattttattgtgatcatgagtgtttctggcattctgtccgtgatattatcaatcattgctcatgcgaaccgccgccggtatattggctgtcaattgtttatgtacatgtctggagcaactgcgatttatatctttgggcacacgtttgaattattggcaagtacacctggacagatcatgttctgggtttgttttcaatacataggtcttccgttcatcgcacccttcagtctgatgattgtgctgcaatttacgggattccatcaatatttcacaaagcgccgcgtgcttctcatcttactgattccaactctcaccaccattatggtgttcaccaactcttttcattcactcttttatcgtagcatcacgatgaatccagtagacggttttttattggctgattttacgattggctattggtatatcattcatggcgtctatacatttggctgttcgatgctcgctatttttatgctggtttggtttttacgtgtcacaaaaaaagaatatttaaagcagatcctcattttgctagtgggaatgttactgccaatcacgacatcttttatctatttattaggcgttacgcctcttcacattgacccggtccctgttgtgatgtttttaaccaatgcactctacttatgggcgattatgtcgttccagctctttaagctctctcccattgcaatggagcgtgtgtttgagcatatgtctgaaggggttctcattttagatcgataccggacactcatagattacaaccccgctgctgcatcgatcattccagcactttctaataaaaagggcattggctataaaattgacgatattttctcaggaatcatcaaagataccgcgttcattcagtggctgcgttctccgcaggatcattcgcaatatgatttaatgtggaaaaaggacaaagatcagtccagttattatcacctgaccgcctcgtcgctatttaatagaagaggagagatcgagggcaggcaaattgtgatcagtgatgtaacagagcagcgtttgctgcaggaagagctggagcgtcgtgcgtatattgatgggttgacgaatatcttcaatcgttcttcttttattgaacgaacgcagatgatcttggaagaggatgcgcaggatacggcgatcttgctgtttgatattgatttctttaaacaaatcaatgacacgcatggacatcatattggagacgaggcgctgcgtcatgttgtcaccatttgtcagcagcatttacagatggacgatttattcggacgatatggcggagaagagtttgctatttgtctgccgcatcattcatttgaagaggcatgtcatattgcggagcgaatgagacattcgtttgagacgagtttctttgagactgatgaggaaaaagtgcgagtgacagcgagctttggaatcgctcatacagcttatgatccaaatgtattagaaactcttctatttgaagcggaccaagccttgtatatgtcaaaacgccaagggcgcaaccggatttatgcgtcaactggagcgggctatatgctgtatgaagagcatgatctaccgccagcttctcattgactgttgtcctgacattcgatatgataaacataacatttgaacggtttcctaaaggggagtagcttttacggtttggtcgtcattacagaaactcacgttgtttctcggccattccggcatgaacatgttagccagacctttgcctatcacacatgaggcaaaggtctggcttttttaaggtcttattgcatctgtgtgatgggggagcgggacaaatgatgttttcaataccgcagatgaaaggatgatcgatcttgaaaaaacatgtgatctctttgttattttcgggcacgcttgtattaagtggatgctccggtttgcttgaccaagtaagtgatacaacgacatatgtcacagaggcaaatgagtatgtgacggacattcagcaatttacggaggactttccacagctcgcagaagaagctgtaaaaaacgccgccaaaaaagcagaattaacccagcagcttgaatcattgaaggcagacattcaagaatttaatgaactgacagcaccaaaaatagcagcagacctgcatgtgcagatcattgaaaaaaataaggtgctgtcagaggaaattcaaacgtatttacagcaattgaaagcggacaacatcgacgttgctgctatgcttgaggaccagcaagggttgatcaagcagcttcagcagtccgtcaatcttttacaggatattgaacaattaacaatctaggacaaacacagctcttagacgcgcattcagcatatctttgccttttccagtggagatatgctttaatttaaggaaagacaagtcatattagaaaaaaggtgatcacatgacagaacatgaagaaagacatatggcttcgcctagagccgagaaggataaagatcaattgatcaatcggttgaaacgagtggaaggacaagtgcgcgggattcagcaaatgattgaaaacgatcgttactgtatagatgttgtcaatcaaatctccgctgtcaatgcagctttgaaaaaagtcagtcttcatttgatggaaaagcatacacatcactgcgtagcggatgctattaagagcggcaatggggatgaagccattgaagagttaatgaacgtctttcataagctcacaaaatcgtagcatttatatgtttacattgataccctactagggtatagtaaggtgtagaaaatgattgatggaggcgatgagaagtggaacaagcaacacttcaagtgcagggcatgtcttgcggacattgcgtgaaagcagtcgagggaaatgtaggagaattagcaggtgtagaatctgtgaaagtccatttagacaagggacaggtggaggtttcttttcatcctgatcaagtcacgttacaccgaatctctgatgtgattgaagaacagggatatgatgtcgtataaatgatatacgtgctgcatgtgacagcgcgtatttttttcaaaaaaagatacccccatggagtatgtgaagaggtgagatgaatgaaaaaggaaattgattttcatattacggggatgacctgtgctgcctgtgcaggacgcattgaaaagggtttgaacaagctggaaggtgtggatgatgccaatgtgaatttggcgctggaaacatctcatattgtgtatgaaacagaacaactaacaccagatgatctgaagcaaaaaattcaatcccttggctacaatgtggtgatggagcaagcagaatttgatatagagggaatgacgtgtgcagcgtgtgccaaccgaatcgagaaaaaaattaaccggatggacggtgttgatcacggatctgtgaactttgcacttgagacccttcaggtcacgtatcatcctggccaaacgtctacaagtgatataaaagatgcggttcagtccattggatattctttaattgaaccagctgcagatgaaacagaggaaggaaagaaagatcatcgccaagcagcaatagagaagcagacggcacgctttttattttcaatgatcttgtcactgccgcttctttgggcaatggtcagccatttttccttcacgtcttttatttggctgccagaagcattcatgaatccatgggttcagctggctttagcagcgccggttcagttcattgtcggctggcccttctatgtaggagcatataaagctttacgtaataaaagtgccaacatggatgttcttgtcgcacttgggacatcagctgcgtttttctatagtttatacgaaagcattcagtcagcggttcaaggcacacatgaggcagccctctattatgaaacaagtgctgtgcttattacgttgatcgtgctcggaaaattaatggaagcaagagcaaaagggagatcatcagaagcgattcaaaagctgatgggcctacaagcgaaagaagcggtcatcgagcgagatggaaaagagatgaccgtgccaatttccgaagtaaaagtgaatgatcttgtgtttgtcaaaccgggggaaaaagtgccggtagatggagagatcgtggagggaacaaccgcaattgacgagtccatgattacgggagaaagtctgcctgttgataaaactgcaggtgatgcggttatcggggcaaccatcaataaaaatgggtttatgaaagtgaaagcgacaaaagtcgggaaagagaccgccctttcacagattatccgagtcgtagaacaagcacagggctcaaaagcgccgattcaaaggatggcagatcaaatatcagggatattcgttcccatcgttgtaggaattgctgtgctcaccttcctgatatggtttttctttgttgatccaagaaatgtgacatcagcacttgaaacctttatagcggtcatcgttatcgcatgtccgtgtgcgctcggccttgccacaccaacctctataatggctggcagcggccgtgcagctgaatcaggcattttatttaaaggcggggagcatttagaagtgacccaatcactcgacacggttgttttagataaaacagggactgtgacaaaaggggagccgagtctgacagatgtgttggcatatgccaattggacagaagatgcgctgctacagctagcaggatcagcagaacagcagtcggaacacccgcttgccagagcgatcacagacggaatgaaggaacaaggtcttgaagcggtcgaggtcgaagcgttccaagcagacccaggccatggaattgaagcaaaagccgcaggacgcaagcttttgattggaacgcgtaagctattacaaaaacatcatatcccatatgatcaagtcgaagcgtctgtaacgttactggagcagcaagggaaaacggctatgcttgtcgcgattgatggagaagtcgccggcatagtcgcggtcgcagatacgatcaaatcatcctcacctcaagctatcaagcgtctgaaagagcaagggattcacgttgtgatgatgacaggtgataacaagctgacagcagaggcgattgcgaaacaggcgggcattgatcatgtcattgctgaagtcctgcctgaggaaaaggctgctcacattgcggcgcttcaggaacaaggaaagaaagtcgccatggtcggagatggcatcaatgatgccccggctcttgcgacagcgaaaattgggatggcagttggaacagggacagatgtcgccatggaagcagcagatatcacgctcatgacaggagacctccatgccattgcagatgcgcttgaatttagtaaaaaaacaatgagaaacatcaagcaaaatctattttgggcgcttgcttataactgcattgggataccgatagctgcttttggacttcttgcgccatggcttgcaggagcagcaatggcctttagctccgtgtcggttgtattgaacgcgctcagattgcagcgtttgaaaccggttagagagggagtggcacaatgaagctgaatgtcaaatggatttggacgattagtgcattgttctatgttgctcttgttcttattggatatgctatgtatgatgaattttatccaaagcaagaaccgccaagtgaacaaatgcaacatcattaagacttcgccaaaagcgaagtctttttttaacaattttgtggaaaaacccaccttttaaaagatttttcataaaaaattcacttctttttgttcctttttgtcgttttttgtaggttcatcgttaagatgcgattaagcaacaaagaaagcgttatcaaaaaaagggggttcacgtatgaaaaagttagggttagcttctcaaatactcattgcacttgttctgggtgttatcgtgggagcgctgttttatcaaaatgaaaccgttattaatgtgttaacgccgattggcgatatattcatccatttaattaaaatgatcgttcttccaattgttattgctgcgttgattgtagcagtagctggtgtaggggatatgaaaaccatcggaagactcggcggaaaaacgattctttacttcgaaattgtgacaacgattgcattagcagtgggactgcttgcagcaaacgtcttccatcctggtacaggaattgacatgagcaacatggaaaaaggcgatatctctaaatatgaagagacatcgaaagcttcttccgaaaaagcgagtttctctgaaaccattgtgcatctagtgccaacaaacgttttccaatccattgcagaaggtgatctattaccaacgatcttctttacagtcttattcggattaggaattgccgcagtaggagacaaagggaaaccagtattaggattctttgagggtatactcgaagccatgttctgggtgaccaataaagtgatgaagtttgcaccatttggtgtattcgcgctcatcagtgtgacggtgatcaaattcggggtcggagcgcttctcccgctaggtaaactggtacttgtcgtttacggtacaatggcattcttcgtcattgtcgtacttggcattatcgcaaaattagctggaacaagcgtctttacactatttagagtgctaaaagaagaaatcattcttgcattctcaacagcaagttcagaagctgtactgcctagacttatggataaaatggagaagttcggctgcccgaaagcgatcacgtcgttcgttatcccaacaggctacacctttaacctagatggaagtgccatctatcaatccattgccgccatatttgttgcacaaatgtacggcatgccgctttccatctatgagcaaattacgttactattaatcttgatgctgacatctaaaggaatggctggtgtaccaggtgcatcaatcgttgttgtcatcacaacacttggtgcaatgggactgccgcttgaaggacttgccttcatcgttgggatcgaccgtatacttgacatggttcgtacaactgttaacgtatttggtaactcacttgcagccattgtcatgtctaagtgggaaaaagtttttgatcaagagaaatcgaagaagtatattgaggaattaaaacaacaaacaaaagcagcgtaaaaggagatcttttcaaatgacgaagctacaggacaagcaagttcgaatcgaacgagactttctaggtgaaaaggaagtagacactcaagcgtattatggaattcaaacattacgtgcagtagagaactttccaattactggctaccatgttcatgaggaactcatcaaagcattagggattgtcaaaaaggcagccgcacttgcaaatatggatacaaagcgactatattctggtcttggagaaaaaattgttcaagccgcagatgaggttattgaaggaaaatggaacaaccaatttattgtcgatccaattcaaggcggggctggcacttcaatgaatatgaatgccaatgaagtcattgcaaatagagcgcttgaactactaggaaaggaaaaaggcgcttatactgagctaagtccaaacacgcatgtgaacatgtcgcagtcaacaaacgacgttttcccaacagcgattcatatttcaacattgaatatgattgaaaaactactttatacgatggaaaacatgcatcaagtcatgacggaaaaagcgcaggaattcgatcatgtcattaaaatggggcgtacgcatcttcaggacgctgttccaatcagacttggtcaagagtttagtgcttatgcaaaggttcttgctcgtgatattaaacgtatcaagcagtctagacagcatttatatgaagttaatatgggagcaacagcagtcggaactggcttaaatgctgatcctaaatatattcgccaagtggttggctatctatctgacattagcggattaccgttagttggagctgaagacttagtcgatgccacgcaaaatacggatgcttatacagaagtatctgctgcacttaaagtatgtatgatgaatatgtccaaaatggcgaacgatattcgtttgatggcttcagggccaagagcaggttttggtgagcttcacttgccgccgagacagccaggttcatccatcatgccagggaaagtcaacccagtgatgcctgaggtcatgaaccaagtggcattccaagtcatcggaaatgaccacacgatctgtcttgcatcagaggctggtcagcttgaactgaacgtcatggaaccagttttaatattcaacttactgcaatctctcagcatgatgaaaaatgtattcgaatccttcgtggacaactgcttgcgtgatctaaaagcagatgaaacaagattaaaagaatatgtagaaagaagtgctggtgtcatgacagcggtgaatccgcatattggttatgaagctgctgcacgaattgcaagagaagcgattcttacaggcgcatctgtacgtgagctttgtctgcaaaatgatgtgttaacagaggaagagcttgacgtcatcttgaatccttttgaaatgaccaaaccaggtattgctggcgcatcacttttagaaaaggatcgtttagaagattaagcggcatcatgagaagcgcacaccgacaaagttccggtgtgcgctttttcatggatgtttgtttttctcaagctcacatagtatactatcgtcaattattagggatgtgactgcgtttgaatctactaaaaaaatggctgaatacagagccttatttaattgtgatgctcattgtactgacaccgattggtggagagtttaaattttatccatttgagggcagctttcgggtcagttttggaaccgttgtctttttctttatcctgcttcaaatgaaaaaattcccggcatgggcaagcggtattattgcaggggtatctgtttttgcgtttcgcgtgcttcttgatacagccgtcacaggtcatcttccgctggaagaggcggtttcattaagatttccttcccttctttattatgtcgtctatggcacgctcttttatttattacaggtcagacgtttccgcgatcagccttggctgattggtgcgacaggcatcatcatggaactgtgtgcgagcgttgttgagatgattgcacttcgtggcaccatcgatgaaattttaacgatgcggacgctgtttcaactttttgttttagcgattttcagaagctttttcgtgttggcttgttatacaatgattcgattatatgaagagcaggcgagagagcgtcagatgaaaaaggaaaaggaacatctgctcatgctcctgtctaacctttatacggaatctacatactttcataaaacacttgcacatgctgagcacattacagcgacatcctatcaattgtatcaatccctgcaccacgcaaaggatacagaatcattggatttgaaaaagctcggaaaaacagccctgcaaattgcaggagaggtacatgagatcaaaaaggataaccagcggattttttctgcattatcaaagctgattcatgaagaaaatttccaggcttatgcaagtcctgcccatattgctgggcttgtgattcgtatccatgaaaattacgcagaatctcttaaaaaaaacattgtctttcattatgatgaagatgggcagcatcccgcctatcacgtgtataccattctatctttgttaaataatatcgtttccaatgctgtcgaagccattccagtggatggagaggtgtcactctctatttcacagaaagagaaccaggtgatctttcaaatcagtgacaacgggcctggcattaaagagcgtaatcatcatgttatttttaaacccggttttactttaaaatacgaccaggctgggaatccatcaagcggtatcgggctttcctatgtgaaggatacagcggagaagcttggcggaagtgttgagatgaagagtatcccaaataaacaaacgattttcacgttaacgataccagtggatcaagtcagtaggaaagaggggattgggagatgagattttttattgttgatgatgatgaagccgtgcgttcttcactggctcagctcattgaagatgaagagcttggcattgtcgcaggggaagcagaggatggcgcagagttaacggcaagctacttaaatgatttgcacattgatatcttatgtattgatctattgatgccggaaagagacggtcttgaaacgattcgagccattaaggatgagtttcatgggaaatacttaatgctgtcgcaggtagaaacaaaggaattaatcggccaggcgtatacgcttggtgttgagtattatgtgacaaagccaatcaatcgtgtagaggtcttaagtgtgctccatctcatgattgaacgtcttcatttagagcattcaattgaaaacattcagcactcactcaaatccgtcatgcagtttcagcagcgcggtcagacgaaaacgaagcagcgggggaaaagtcttgcagaggcaggtcagttcttgctggcagagcttgggattgtgggtgagaaggggtctaaagatttattagatatgattctcttcacagatcagtatgtagcgctgcataccgatcatcacgattcttttccttctttaaaggtcatttttaccggaatcacggaggataaattaaatgagccgtacacatcagcagacattgcaagagaagcgaaggcagcggaacagcgggtaagacgtgcgatcaaccaatctttgaaacacatcgcatcacttgggttaactgatttttctcatccgacctttgaaaattatgcatctaaattctttgatttcaccatcgtgcgaaagaaaatgagtgaattaacaaaagagacgagcgggagagaagaacacacccgtatcaatgtgaagaaatttgtgcaggtgctctactacgaagcaaaacgtatttttatggaagattaaaaaaagacatgctccctcatgagggagacatgtcttttttggtgatggattgcaggtgcatctgcagcacggagcgtatgagctcaggcggtaaacgatgaggctgcaagattccattcaatgcaagcccattgatgaccgcataaagccgctcagtttcgactaaaagatcgatatgatcaagcaaaagcccatcctcttttaatttcattaaacaaaattgggtcgtttggagaagctcgtcatacatctttgcattgagcggctgtaaatctggttcagtcagcgacttgactgtaaaagcctgccacacctccatttcaaatcttcgttcttcatcaagtggaagaacctgttccaataacgcgaggacattttcttccgttgaaccgttaagctgaagtcctgtcatacgctctttgactctttcctgaatcaatgtcatagagaaaagaaataactcttgctgtgtggaaaaataatgacgcatagagcccgctgaaataccagcttctaccgctacttttcgtacagaagcgttttccaatccatcctgtttaatcactctcatggcagcttgagcgactttttgtttttgtttatggtgatcgacgatttttggcatacattgattttagcacagctattgttttttttaacacagttgtgttattttttatttaatacaattgtgttaaaaaggatgtggtgaaaattggtcgggttattgattgtggcatgtgaaattggtttttggctgtttattctggcgggtttaacactgcgttatgtatttagacagaaaaagtggggcgccttctttctggtctgtacgccgattttggatctaatccttcttgcggctacttatatggatttaaggcaaggggctgtggcgagtgtcatccacgggcttgcggctgtttatattggggtgagtctcgcctttggacatcaaatggtgaaatgggcagatgctcggtttgcttatcgatttgcaggaggccctaagccgaagggaagacctaagtacgggaaggaacggtcagtgtatgaaatggtcagctggacgcggcatttcgtctcttatgtcatcggagctggtctgctatttgggttatcttttctcatccaagcaccagaacgaacggaagcactgatgcagctagcgagagtatggggaatggtcttagccattgatttcgtcattagcattagctatgtgatctggccgaaaaaacacccgcaaaatatagccagctaataaaaaagacaggcgaaatcactccgcctgtcttttcttatgatgaaagccctttgtaaatggtgtcaatattccatttcatcatcttatagtagctgtctccgtcttcacctttctttccaatagagtcagtgaatacttttcctttaatcggaaccccggtttcctcagataggctttcaaggctgcgttgatcgacacttgtttcaagaaagagcgcaggcacttgatgatctttgacgaaatgaatgatgcgcttcatctgtccaggtgttccttcattttctgtgttaatctcccaaatgtatcctgccttcagtccataggcatctgcaaaatacttgaaggctccctcacttgtcacaagacgctttttatcttttggcagctggtcgaacttgtcttttgcttcatcgtgaagcgcttgaagctttttgatataggcttctgtatttttttcgtaatcctcttgatgctcagggtccgcttcaataagcgcatcccgggcattttgagcatacagaaccccattttcgacattcagccaagcatgggggtcctgctggctttcgaggccttttgaagataaatgttttactttgacgcctttacttaattcggctacaggtgcatcatccccgtccttgccactcgattcgagcagcttttgaaaccagccgttccctgtttcaaggtttaaaccattatatagaacaaggtctgcatccgttgtatgctgaacatcctttggcagtgggtcaaattcatgtgggtctgtaccaatgggaacaatgctgtgaatagagacatgctctccgcctacttccttcacaatgtcataaagaatggagtaggtcgtgacgacttttaatgtgccgtcatctttgccggaattattttgtttagtagaacagcctgtgatgaccataagggcaatgaatactgcggtcaaacggattgcaaataccttcttcatatatgtcctccttttacatagacgcttccttttttagctgcgttcgttttcgtttagattttaatgatctccatagaattccttgctttggtgaaaggataaaggcactcccgaataaaatggtcgcgaccagcacgatagaagcgccagacgacaagttatacgtaaaactaagcccaagtccgacgacggcagaaactgccccgaaaaaagcagataaatagatcatgatccatagccggtctgttaagagatacgcagtggctgccggcgtaataagcatggcaacaacaagaataatcccaacagtttgcagtgaagcaacggtcacaagggtcaacagcgtcatgagaaaataatggatcattcgattcggtaaaccgtaaaccgaagaaatgaccggatcaaatgaactaatgagcagttctttgtagaaaacgatgacagccagcaggataaaaatgccgatgccaagtgtaatccacatatcagatgatcgaacagctagaacgtttccaaacaagatatgatataaatcactggaacttttcaaaaatgtgatcaaaatgatcccgattgagaaaaaagcggtgaagacaatgccaatcgcagagtcatttttaattcggctgttttgactcacatatccgatcccaatcgctgttaatacgccagttaagacggccccgaagaaaaagttaattcccagcatataagagatggcgacacctggcagcacagcatgcgatatggcgtctcccatcaatgccatgccccgtaaaatgataaagcagccaatgaccccgcaaataatgcctaccatcacggatgtaaataacgctttttgtaaaaacgcatattcaaagagtccggttaaaaattccattacacgtctcctcctgctgattttaagaatggtagctgcgtttcatatgcctccagcatgacctctgggcgaaggatgtcgtgtacaggtccagctttgatgagttttttatttaacagaacgagatgactgaagtaatcatcggctttacttaaatcatgatggacaaccaaaatggtttttccttcatcccgtaattcttgcaaaatgcgaaccatcgtttcttcactggccatatcaatcccaacaaacggttcatccaaacagaagagctgtgcgttttgcgcaagtgctcttgcaaggaagacacgctgctgctgaccgccggataactcaccaatctgtcttttggcaaagtcctgcatgccgaccttttctaaacagtggtacgcatatgcccggtcttcttttttcggacgtttcatcaggccaagcttcggatatgttccaagtagcacggtatccagcacatgaataggaaacgtccagtctagatcatttctctgtggtacataggcgatctgttttctgacttgtttaaagggctgttcaaaaaagcgaatatccccttggtctttttcaattaaatccaaacatgccttgagtaaagtcgatttaccggcaccatttggacctatgattcctgtcatcgttccttcctgtatggaaagagagatgttctctaatgcatcctgcccgtgatatgagacatgaagacggtcgattgttaaagcatttggcatgtctgcggcccctttcaatcatcattgcacttcctaaagatatatgcatacattaaatagttttgactaaaggatgaaatgattctctaatgctaatttgtttccttagggaaacttttatttcattctaagtgtatgtccttcttttgtaaagagaaaagctgcactttttctgtcagaggtcaaactatcgtttttatgttatgcggggagcgggggacatgagcttggattattgaaaatccatgtggcaggattgggcataaaaaaaccaaacatttgcttataaatgattgacagctgatcagaactcctcatataataaagataattcaatatatgaatatgtgctcatatataatatccacagcagctgataggtttgattgaatcagggaaggctacttatatagaaaaaggtgagaacatgaaaaagatgaaggatgaatacgtattaagcggtcttgattgcggcaactgtgcacgtaaaatagaaacaggtgtcagcaaaatggatggagtggaagcttgctctgttaactttgcgacaggcaccttgactgtgacgcatgcagataagcaagaaacgatgtcaaagcgcattgaaaaaactgttcagtccattgaacctcatgtgagtgtatcaccgaaagaagatggtcatcatcacgatcatgatcacgggacgaaaaatttaaaaacgattgtgctgaaattaattggcggtgcagtcattggaacagcagctttctttatacctgaagatggtgtattaaagttcattatgttcttcgcagcatatttactagtcggcggtgatgtggtttttaaagcgctgaaaaatattgtgcgaggtcaagtctttgatgagaacttcttaatgacgattgcaacggttggtgcttttgtcattcagcaatatccagaagcgcttgctgtcatgctcttttaccaaattggagagctcttccaaggggcggcagtgaaccgttcaagacgatcaattagtgaattaatgaatatacgtccagaatacgcgaatctaaaagtcggaaatgaaacgaaaaaagtgaatccagaagaagtaaaagccggtgaccgtattgtcgtgaagcctggtgaaaaaattccgctggatgggctcgttattgaaggcttctcacttgttgatacatccgcattaacaggggagtcggtgccgcgggatgtagaagcgggaaaagaagttcttgcagggtttgtgaatcaaaacggtatacttgaaattgaagtgcaaaaagagctaagtgaatcggcagtgacgaagattttagatttggttgagaatgcgagcagccgaaaagcacagacagaaaatttcatcacaaagtttgcaaaatattatacaccggctgtcgtcttgcttgccttattgcttgcctttatgccgccgcttttcattccatcggcacaattgtctgactgggtgtaccgggcacttgtctttctcgtgatctcttgtccttgtgctcttgttgtgtccattccattaggatttttcgggggaattggggcagcttctaaacgaggcatccttgtgaaaggcagtaactatctagaagcattgaattctgtgagatatgctgtatttgataagacgggcacactcacaaaaggaaactttacggtgaccaatatcgtcacaaccagtgacaagtggtcagaagaggagctgctttcttttgcagcactggcagaagcccattcctcacaccctattgcagaatcgattaaagcggcatacagctcgccgcttgatgaaagccagattgaagcatatgaggatatcgcgggacatggaattaaagcgaccatcagcggttcccatgtcttagcgggaaatcatcgcttgatggagcgagaaggcattgcgtatgaaaaagaaaaaagaagcggaaccgttgtgtacatggcgattaacggtgagtttgccggatcgatcttgattgcagatgaattgaaggatgatgcaatcgaggccgtttctgctctaaaagcgtctggtattcaaaccgtcatgctcactggtgatgctaagcaagtcggaactgcggtcgccaagcaaattggtatcgacgaagtacatgcagaattattgccgcaggataaagtaacgaaattagaagaaattgatcagaaaaaagcgcctcaagaaaaactgttatttgttggggacggcattaatgatacacctgtattagcaagagcagacataggaattgcaatgggcgggcttggatcagatgcagctgtcgaagcggctgatatcgtcatcatgacggaccagccatcaaaggtagcagaagccatcgctgtcgcgaaacgaacaagaaggattgtatggcagaatatcgcatttgcccttggtgtcaaaggcgttttcctattactcggagcattcggaattgcgacgatgtgggaagcggtcttctcggatgtcggtgtcaccgtactcgctgttttaaatgcgatgagggtcatgaaataaaattgtaaggaaaatttcatgaataccatctttcataatggaccccctcttgttaaaatagaagaagttggataatggcatttttctaagctattatcctttttcttttttaaaggaatgataaagataaggtaggtgcttatgtgagtaaaaaaaataatcaatcttcatccattaaatttgctgtcattttaaccattatcgcagctcttctcatcggtatatttgttgtgattggaaacaagaacagccaagaagcacaaacagttgacagtaagccttcgattaaaggacagcctgtcataggagacaaaaacgcagcggtgcaaattgtcgagtttggggactacaaatgcccgtcatgtaaatcattcgaaacagacattttcccaaaactgaaagcagactacatagataaaggcgatgtatcattttcatttattaacttgccactgcctgttcatggagatggcgcagtgttagcagcactagcttctgaagaagtatggaaagaagatccaaaaaacttctgggcattccatgaagctgtctatcaagcacagccagatagtgaagcggaatgggttacgcctgctaagctgactgaactagcgaaaaagacaacaaaaattgatacggacaaactcaaagataacttatcaaagaaaacgtatcagccgcagctgaacacagacgatcagcttgtgaacaaatataaagtgaattcaacaccaacgattttgattaacaataaacaagttcaaaacttttatgactatgatgaaatcaaagaattaattgatcaagagctcaaagggaaaaaatcatgaagaataagctcatttacttatacagtgcttggattgtctctatcgttgcgacgatgagcagcctgtatttaagtgaaataaagaagtttatcccatgcgatatgtgctggtttcagcgcattttcatgtacccgctcgtgctcttacttggaattgctacgttccggggcgatgtcaaagtgaagtattacgtactccctttggctgtgatcggtgctggcttttccatctatcattatatggaacaaaagatcccgggctttgcgtcgattcgcccttgcctcagcggtattccttgttctgttgattatttgaactggtttggttttatcaccattccgctgttagcacttattgcatttattcttatcatcctcagtatgctgctgttaaatgcaaaagaagattgagagatagcctgcttttaagcgggctattttttatttttgcaaaaagataaaatttaaagaaaatttgtattgcttttcgcttatgtcagatatacattaagggagtagtgttagatgatcagatcatgtaaggagataagcggaaaatggcatgggaagtcttaagtatcattggtattatcgcattcgccattagtggtgcgatagtagcaatggaggaagagtacgatattcttggtgtgtacattttagggattgtgacagcatttggcggtggagcgattcgaaatctattaatcggtcttccggtgtctgctttatggtcacagggcaaaatgtttaccattgctcttgtatccattacgattgtgtttctttttccaaagcttttgctcaagcactggagcacatgggggaatttctcggatgcgattggtttagcagcgtttgcgattcaaggtgcattatttgctgtgcaaagagagcttccgctcagtgcggtcattgtggcagccattttgactggaagcggaggcggaattgtgcgtgatttattggcagggcgaaagccgcttgtgctaaaagcggagatttacgcagtttgggcagcacttggcggcttactcgtaggactcggtttagcacaaggagagattgctttgtatttgctgtttctcatccttgtcgtatgcagggtttgttcctacctattcaaatggcggcttcccgctaggtcttattttctaaataaagggtaaaacgagaaaagagcggtttcgctcttttttttgtgtttgatacgagctggatgtcagcaggtaatggagttttcgtgtaaaataaaagcagggtctttttgttcatcattggaacaatacatgggatgaaaattttgtcagctggctgaatatctggattcagctttttttgcctagatggattgttatgtgttggtttcacattttgcggaatactaaagaagcacctatgatcggacggatgaatcaacatggaatgaacacatctttgcatgtaagcaaaacttgacgaaaaaattgaaataggagggacacgtactagtggagatttttttggcagtgctcgtattactagcactcatcgcatcatctaatattatcaatcgttttgtcccctttattccagtcccgttaattcaagtgggcttaggaatattggtggcggcttttccttcaggtttacatatttctttaaatcccgaactattcttcgttttattcattgcgccgctgttatttaatgacgggaagcgtaccccaagggacgagctgtggaaattaagagcgccgattcttctgttagccctagggttagtatttgcgacagtcattgtagcaggatataccatccattggatgatcccaagcattccgcttccagccgcatttgcgcttgcagcgattttatcaccgacagatgtggtagcagtaagtgctctttccagccgtgtgaacatgccaaagggtatcatgagactgctggaaggcgagggattgatgaacgatgcatcaggacttgtcgcctttaaatttgccattgctgcaacagtgactggcgctttttcgattgctgaggcatcctttagctttgttctgattgccgcaggtggtctattgactggatttattctatccttttttatcattcgttttcgctatttcctccgccgtctaggaatggacgatgtcacgatgcacatcatcctgcaaattcttacaccatttgtcatctatttagcagcggaagaaatcggtgtgtccggtattttagcggttgttgctggcggtgtgacacacgctattgagcaggatcgaatggaagcaaatttagccaaactgcaaattgcttcatcaaacacatggaatattattttatttattttaaacggacttgttttcgttatccttggattgcagattcctgatgtatcgacggtcattttccaggatgaagcctttaataatatgcaggtcatcagttacatcttaatcatcacgctgtgtcttatgatcctgaggttcttatgggtatggctgttctgggcagggaattggagtgcaacgaaaaagcaaaatgtgaaaaaaccgaagcttcgcgcctcgatgctcatgacattctctggtgttcgtggggctgtgacattagccggtgccttctccatcccatttacacttgcggacggatcaccgtttcctgaacggcatttgattattttcctcgcagcaggcgtcatcttatgtacactcattttagctagtgtgttactgcctcttttatctgagaaaaaagacaagcaaatcgccgtggacttggatacaaagattcagcatgcgaaacggaagctgctaagaagtgccattaaaaccttaagagaaggaatgaatgaagacaatagggaagtgtctcttgcactcatcaatgattaccgaatgaagctgcgcaatatccagcgtgaaccgtatcaattcgggatgagaaaacaagagagaaagatcaggctgcacggaatcaaagctgagcagatgaagctgcaacagctcattgaggaagagaaaatcgataaagaagaagcctatgagctgcaagaaagatttcatgagctagaaatgctgtattcaaactccttcaaaatccgtttttcaaaagtgaagtttctgcgcttgcttcaatggctccaattatggcggccgaatcagcacgtttccagcggcattttagaaaacgagggctcgtacaaacaaatccgtaagaaaacggctgaggctgctgtggactcgatcaaacagcatatgaccgatgaaaataaacaaacgtgtcatcaagtgattggtttttacaaccaagtcatttatcgatgtgaacacggtccaagcttctttcagcaaaaagaccgttcatttgaccggaagaaaaaagagcttaacttccaagctgtacagacaatacgaaatgaaattcaaactttgtatgaagatggtgaaatcaatcgtgatattgcccatcatttaagggagtatatcaatgacatggaagctgttctcctgaccaatacgtaatgttgtcatcttttcccctatgttttatgatgaagaaagagaacgagcagggggagatcaaagatggcgtattatggagcaattgaagctggcggtacaaagttttgttgtgcaataggcaatgagcatggggacattctcgaggaaatgacgattccaacagagcacccagaaaaaacattacaaaagctcattccatttttcgagcagcatgacattgaagcattaggggtcggctcctttggaccaatctgtgttcaaaaagacgatccttcttacggttatatcatgaacacgccgaaagtagagtggaagcattacccgttcattccagagctagagaagcaattacgggtcccagtatcctttacaacagatgttaatgcggcagccttaggtgaattaacaaaaggagcagccaaagggctgaaaagctgtatgtatatcacggtcggtacgggtatcggtgctggcgctgttgtaaaaaacgaacttcttcacggtcattcgcacccggagatggggcacatccttgtcaggcagcatgaatcagacccgtttgaaggagtctgcccagcgcatgggacgtgtttagaaggactggcagctggcccagcgattgagaaaaggtgggggaaatctgccaaagagctcacggaggaagaatcagtttgggcacttgaagctgattatttggctcaggcgctgatgcagtactcgctcattttaagcccagagcgcatcatgatgggcgggggtgtcatgaagcaaaagcagctgtttccactgattcgagagaagcttgctgcttatctcaatgattatgtagacctgccgccgcttgatacatacattgtctctcctggacttgaggataaggccggcatgacaggtgctttgctgttagccatcgaagcgaagaaaaacgcctgataatagagttttaatggacaacgtgagataatgaaaaagatggaatctaagaaaaaggtggttgttaaaatggtcaaaagcttgaatgataccgtaacactgaataacggagtggaaatgccttggtttggtttaggtgtattcaaagtggaggacggcaatcaagtggtagatgccgtaaaagcagccatacgaaacggataccgcagtattgatacggctgccgtttataaaaatgagacaggcgtaggcaaagcgattaaagaatctggcgtgaaacgagaagacttgttcattacgtctaaagtatggaacacggatcaaggctatgacaaagcgctggctgcgtttgacgcaagcttgaatcgattaggtcttgattacttagacctctatttgattcattggcctggcccaaatgcagatacatttaaagacacatggcgtgcgcttgagacgctttacaaggatgggaaagtgagagccattggcgtcagcaacttctacattcagcatttagaagagctgttaaaagatgctgaggttgttccagccgtgaaccaagttgaatttcatccgaaactgacacttgtcgaactgcgtcaatacgcaaaagaaaaaggcattcaaattgaagcgtggtctccgctgatgcaaggaaagctattagatcatgacgtattgaaggacattgctgcacgctacaacaaatctgttgcgcaagtcatcttgcgctgggatctgcaaagcggcgtcgtgacgattcctaaatcaatcaacgaagaacgtattaaacaaaatgcagatatttttgatttcgaactatccaaagaagacatggaaaaaatcgatgcgttaaacaataacgagcgcgtcggctcgaatccagagacgatgacggttgggtttgaataaatgaaaaaaatcctctttctcatatgagaaaggggattttttatgtactgcttctgcgcacagccaaaagcataataaaagataagatcacaatacaaatcgtccaggcccaagcaagttccattcgtccagagtcaatcgccacatagatagcggttgggagtgtttgagtttttcctgggatgttgccggcaaacattaaggtcgctccgaattctcctagggctctcgcaaagctgaggacgctgccagacagcagggaaggcagggcaagaggtaccgtaatataggcaaagacttggaatgaatgagcaccatcaacttttgcagccccttcaatatctgactcaattgtagaaaagcccgcctttgctgattgatacatgagcggaaatgccacgactgtcgaagcaatgaccgccgcccaccatgtgaaaatgaccggctgatggaagatccattcaatcgcgccccctattacactatgttttccgaatacgacgagcaataaaaagccaacgactgttggtgggagaacgagcggcatcatcaggaacgtttccacaatcattttccctttaaaagttgttcgcgtcatccaaaagccgaccgttgtgccaaaaacagtggccaacagtccgctgacgatggccacttgaatggacagcaaaatgggtgatagaaattcttcagtcagcatagccattacgacacttgaaagccgtatttcttaaaaatggatttggctttatcagattgaagaaattgaaaaaagaccttggcttccgttagatgttctgtcccttttacaatccctactggatacataatcggggagtgcatgtccggatttgcctcagctgcaatctttacttttttggaaacgagggcgtctgttttatacacaacacctgcttctacatttcctgtttcgacgtagcttaggacttgccgcacatccttgccgtagacagcattctttttcacttggtcccatatgttcagttgtgtgaagatctctttgccatatgtaccagcaggaaccgattcaggtgtgccaagagcaatctttccttttacgtgccggacgtcttgaaagcttttaatagaggaagagccatcttttggcacaataaggactagctcgttttgtatagcgtccttgatataatcttgatcaatgtctccagattgaacaagttcatcgaatggctcctcagctgctgagaaaaaaagatccgcttttgctccttgagcgatttgctgcttcaatgcgccggatgacccgaagttattcgttaatgtcacattcggatgttgcttgtgaaaggaggcttcaatttcctttagtgcatcctgaagacttgccgctgctgaaatcacaagctctgtttttttattcgaattagatggcatcatctctgtttggcatccactcaggagcaaacatatggagatgaaggctaagaatgtatacttcatgttcacacctcttatcattcaatatcatgtggttccctttattataagcaaacttatttgagcattcataggctttcagtaaaaagagaaaagaaaagccgccaaatggcgactttcagcgtgaagataaaagggatcgttttatcctgtttacttctgataaaaacgcagcaaattcccattgatcactttgtctgataaggaaagctctttattggctttttcgatataaggctgacacacctcatcctgttcaacaggttcttttgttttttgatcatagcaggtgttctttgtatagagataatcatctgtaataaagttcccgtttctcagtacagcgaaaggcgtacgttcatttgaaaataaatcattgccgaattgaatggcatccttcgtttcaatcccaagtaagtgaagaagtgtcggctttacgtccatttgaccagctgtttcagaaatggtctgcggtgcttgatccgtgacacctggaatgtaaatcaaaaagggtacccgctgcagtttgaccgcatcaaacggcgtaatttcctctttattgagcagctgtgccattgcctcatgatgtgcctctgagatgccatagtggtcacccatgaggacaaacatcgtattgttatacaatccttcttctttcatacggtcaaaaaacattttaaccgcttcatcttgatagcggacggtcgtcacatagcggtttaaaatggtactggacgaatcatattcatcaataaactgatccttcgggtcaatttcaaatggaaaatgattggtcagtgtaatgaatgtgctgtaataaggctgcttcaacttttttaaatgatcaatggattgatcaaagaagtcgatatcttttaagccccagccagttgaattccgttcattgacatgatatgaatcgacatcataaaaacgatcaattccaagcgattcatacatcacatcacgattccaaaacgttttattattcgcatgaaattggacggattgatagttttcctttttcaactgcttgtataacgtgtcatattcgttgtcactcgctgtgaaaaagacagcgccgctgctagaagggtagagggaattagcgacaataaactctgaatccgacgtcttcccctgctctgtctgctgataaaattcatcaaaataaaaactctttttagccagttgatttaaaaagggagtgatggattgtccattcaccttttgattcatgacaaattgctgcgtcgattcaagtgaaatgaacacaacgttcttgcctttagcaagtccaaaatactcttcgtttggtgcgctgtaatcagcctttgtgtagtttgctacagtagaaagcgtatcttcatctgcaaaggccttttgtccaatgcgtgccgtttgggcagcaccgtcatacagatgaaattggaaaagcccgaggtttctgacaatgacttcacgatcataagagcttgtcagaaatcgagggtgatccatcatagctgagctgacatgaaacaataagaagctgcagcagaccgcataatacgttttgatcgtcttgaatgacgcttttggggctaatggtttgcgcttgagcagccatgccagtaccacaaaatcaatgagcatcagcacaaagagcgggtggaataattccgtcatactgctgcccatatctcccatgttcttcgcttggaataacacgggaatggtaatgaaatcaatataaaaaccataaaagatcgtattcgagatgagaatcgccgttagaataaaatttgcggtcaataaaaaaaccttttggttggtttcatttaaaaaaagagcaatcccaaacaaagggagcaaaaagctaagtggattgatcaaaagcagccattcatgaaacagattggccgttcgtatgtgaaatccgaattgataaatgatgtatgttttcatccacatgaaaaggatggaatacactaaaaaccagtgatttttgaaaaacgctttcatttatgtatctcctcaccattctgtattcagctgcaaggcaaaaacacttatcttaaacctactaaaaaaatgaggaatgatcaattcatatcctgtctttttcgcaaaactctttttttattctgttagaactggattgggatggatatgccgcagatgacggcgatgtaatagcaggtgacgacggtgagagcagctagtacgacttgttctcctgtgctgcctgttttgacatagaaggggagacgcactttaatggaagctggaaataaaaatttaatgccgttcactgttccagcatcaaggataaggtggctcaccattccaacgagtaaaccggtacttaagctgtcatttggaatgtatgttgtcgcgagaaaataaatgatcagcagaaataataaactgtgtgtaaacgtgcgatgaccgaacacgctgctgattagtgtcgagagcagcggaaattttctgccgattttactttttgtatggcaaagatcggggatcagagcacctgctgatccagctgcagccatgatgactgggtcgagtccgtagtagtaggcgacggccgttgaggcggcgattccgcccataatgtgtgtttttcctgtcatgatgcgtactcctgttctatcttttgttcaagtactcactatatcaagggtgaattcattcagcaaggcttatttctaaagaaaaagaggacaaaagggttggctgattggaaaaacattctataataagggggaagtcatgttgatactaacgataaggatgcgattcggatgagtaatgcagacattttaaaagaaattgttctcgtacattatgaagtcagccgtaaattaaaccgcaagttacttgagttagaaaaagacatcacgccaccgcagatatatgctctttctattttgatacaaggcaaagtatcacatgccgaagagctgaaacaaagactctccttaaacccaggtgcagcctccattgcactcaataaattatgtgagcagggctatattcagagagaacgtgacaaagacgaccccacgctagtccggttagaagctacggaaaaaggggtagcgatttatgaaaagcatacacgtcttttcggaaaggtgattcagcatatgatgtcagacttcacaaaggaagacttaaagacctttttgacgtatttgcaaaaaatgagacagaccttccatgatgattgagcctttccaccttgtataatgaggcgcactgtagcacaaattaaacaggcaaccgcattttatgaaaagggaggaaacagcgatgtcatttttccaaaaggataaaaaggcgaaaagcgagcaagaccacaagcaggttgatcagctgttagaagaagcaagcaaagagctagcaggcgatccgcttcaggaagctgtacaaaagaagaaaaacaacgatcaataagcaggtaataggcagagaaatgattctctgccttttttctatgtttttccctttgacagatgtgagaatgtttgataaccttcgtgtagtaaaaatgaatagaaatcctcacgctatgtctcagtgaggtagaggttgcgcggatgatgagtcactcatgggagagatggaatcgaagatcatgagaaaaaaggcatcagcgccgaagtgtagagagagctccaactttctttatgctgggtctgcattgaataaatgcaggactgccacgtctttgaagcgtggagggctatccggagatcaaggtgtatgttttgaaaagcatggactgttgttcaggcttttttttatgttctgagtatctaagataagggtatgctgttaagaaagtgacccatgatgaacataaagaatacaagtcattgcttcacgaatatatcaatgaagatactgccgggtctggtccgaagtgaatataacggaggtacggaaatggaacagacaaaaaatggggtttttggttattgacggcttttgtcgtcggaaatatggtagggtcaggcatctttatgctgccaagtacacttgcccagcatgccagtcctttaggtgtgacgatggcatggcttgttacaggtggcggtgtgctgatgattgcacttgtttttgggcatttgtccattcataagccgcagctgacggctggaccacaaagttatgcaagagcgctttttaacgatccgaaaaaagggaaagcggccggttttacaatggtttggggatattgggtggcaagctggattagtaatgtcgcaattattacgagtcttgccggttatttaacgacatttttccctattctcaccgtgaagacggagattttcacctttggaaaagaagcgatcacacttggtcagctgacaacgtttattgtatgtaccattcttctttggggcacacatacgatcttaattacaagcttaagtgctgcaagtaaattaaactttattacgaccttttcaaaggtacttggattcgtcctttttattgttgcgggattatttgcattccaaacggcattatttgaacattattacttcccagttgcagcagaaggcgaaggagtgctcggacttggaggccaaattcatcatgcggccatttccacactatgggcatttattggcatcgaatcagctgtgattttatcagggagagcatcctcgcagcgcgatgtgaaacgtgcaacgattacaggtcttttaatcgcactttccatctacatgattattacattgattacaatgggcgtcctgccgcatgatcagttgcaaggctcagataaaccattcgttgacgtgcttcagctcattattggaccggctggcggaatagtcatggcactgcttgcgatcatttgtttatttggctcgatgcttggctggatcttacttggttcagaagtaccgtatcaagcagcaaaggctggcgatttcccagcagtatttgcaaaaacaaacaaaaaaggcagtcctgtttttgctttgacagttacaaatatcatgtcacaactgtttattttctcagtgatgtcccgtacgattaatgaagcttttacctttttaacgacatcagcgacacttgcgtatctcattccgtatattgtgtcttcgatctatagctttaaggtcatcatgcaaggtgacacgtatgatcttcaaaaagggaagcgaacaagagacggaatcattgcgcttgttgcgatggggtattccgcttgggtcattatttcaggcacagctgatttgaaaacatttggacttggcatcggtctgttcttagtaggtattttgctttatccattcatgtcaaaaggattcgccaaaggaacagaataattttaacgtttctccagaaatggagaaacgtttttttatgatgcggatgttaatcggtccacaataaactcaagctgtccttctagtgacactgggtcattaaagaaataaccgacaggatcgatttcaaatacgtgtttattttgtacagcaggcagtgatgtccaaatgctgctttcatacacttggtctcctttactttttgaaccactccatggactagtgaaaatatagtcgcctgcgtattctggcagcttttcaagggaaatgtttgcatagccgacaccgctgtcgatagcgtcttttttaactgcctttggcgcacgtaatttcagctcgtcataaataatttcgcctccgcgcgcaaaggtgtttccaaagatataaatacctttatcaaaaggcgacacgattgaaacggttttgctgccgaccgcttttgttactttaggctttacctcagctatttttgtatcccattttgtgatccattctgctgcttttttcggtgtacctgtcattttaccgaattcttttagctgatctttaaaggaatattgattgtatttaattgcaacggttggagcaatttttttgtattgatcaaatttctcgtcttctccccaagcgataatcatatctggcttcaaagccgctaccttttcgacagaaggggttggtccaaggtttttgacaccatccgtttttcccttatagaaagggtttttaaagatgggtgcagttgcagcaattggcgtcttgccaagtgtcacgaggtctccatagtagctttccgccagaagcacaattcgtttcggatctttagggagtttgacctcacctttgacatcctgataggtgattgtgtcattctggttggcgccagattttttatttgaagtgctgccgcaagcagctgtaaaaagcataagaacggctaagaaaatcaaaagaaatcccgatcgttttttcacaaagattctctcctattcactttcttttgataatgattctcaatttcaattatatcgtaacatgatgggatgaaaaatgcatcggctattttaggacctaaagaaaaatggtaagtttctcccggttttttgatgaaaataaagaaaatgttcagaacaatgatttcaaaaagaaaagaaaatgatatactagacttcgagattgataatcattatcactaatgaggaatagatatgaacggaaaggaagagactggttttgggctcacaatcgaataaacagctgccagccaaggacgatgcaatggatattgtcacgaaaccctttggaacagcagctgttgtcatcataggaattatcgctttagcatttggtctttttttatcggtatcattaggagcagcaaatattcatcttcacacggtatgggaagccatttttcaatttgatccacaacaaacttcacatcaaatcattcgggaattgaggctgccgcgtacagttggggctgcactcgtcggtgcctttttagctgtatctggtgccatcatgcaagggatgacaagaaatgcgcttgcgtctcctgaaattatgggtgtgacaaatggctctgcatttgcgattgcgatagcatttgcatttttcccaggccaatcttctttcacattaattctttggtcatttgctggagccgcactcggtgcatctattgtgtttggtgtcggtactctgtctaaaggaggactgaccccagtgaagctcgcactagcgggtacggcggttggagcacttttaagctccatctcttcagcaattgccatccggtttgatgtcgctcaggacatgagcttttggtatgcgggcggcgttgcaggtgtgaattggagcaacattcaggtcattattccagtcgctattgcaggacttttgattgcgatgatccttgctcgctcgatcactgtactgagcttaggtgatgaattggctaaagggctcgggcagtatacgaaaacggtcaaggtgctaggaatattggtcgtaattcttttaaccggtgctgctgtgtcggtggcaggctcaattggttttatcgggcttgtcattccccatgtcactagattcttggtcggagtggactatcgatggattatcccttgctcagctattttaggtgccattttgttaatttatgcagacattgctgcaaggctagtcaatgctccatttgaaacgccagtcggtgccattactgcgattataggcgttcctttcttcttatatttagctagacgtgaaaggagcggaatttaaatggaaatggtgcagcaggcaaagaaaaagaaatataaacgaacgatgctgatgatctttttagccatcgtcgcggtatttctgattagtttaaataccggagaaattcgtatttctccgatagatacattgaaaacattttttggattcggaagtgaaatggatgagcttgtgctgttcgaattcagacttccaagaatgatcatcgctttacttgttggtgcttccatcgctgtatcaggagctatctggcaaggtgtttctcaaaacggcttggctgatcccggtattcttggtgtgaatgcgggcgcaggatttgccgttgtgctctttatctttgcattccaaggcacgatgtcgaacttaggtaatttgacgatttttgtactgccgcttttcgcatttgcaggtgcaggctttgctgcatttctcatctatgtgttagcgtggaaaaaaggcatcacacctgttcgattgattttaacgggaattggcgttaatgctgcgttttcagcagcgattgtggtcatccaattaaaaatgagcccaaatgactttaaccaagccatcgtgtggttatcaggaagcatttggggctcaagctggacgtatgtcctgtctgttctgccatggatgctcattttccttgtgttagcgcttgtgagagcacgctacctaaatatcatgaatttaggtgaccagctgtcctatggcttagggatctcggttcataaagaaagaagctttctgatgctgattgccgttgcattagcaggggcaagtgtcgctgttgcaggtagtatctcgttcctagggttagccgcaccgcacttggcgagaaagcttgttgggccaaagcatcaaggaatgataccggcctccgcgttgattggcgcactgttattattactggcagatacacttggccgcgtcatacttgcaccatcagaggtgccagttggccttgtcgtttctgctttaggcgcaccttacttcatttacttattgatgaaaacgaactaatgaggaaggagaaaaacatatgaaatcgctcgaaacagaaaagctttgtatcggttatcaggaccgtttgattgtagatgatttaaatatcagtatcccaaaaggcaaggtgacaacactgatcgggccgaatggatgcgggaaatcaacgattttaaaaacaatgtcccggatcatgaagtcccatcaaggagctgtttacttaaatggtcaggctattcatcaaacgcctacaaaagaaatttcaaaacaaatggcgatcttaccgcaaacgcccgaagcaccaagcggactgacagtgtatgagcttgtgtcatatggacgtttcccacatcaaaatggatttggtcgcttatcaaatgaagataaacgaatcatcagatgggcacttgaggaaacgggcatgatcgcttttcatgaccggccaattgaagcactttccggtggacagcgtcagcgtgtatggattgcgatggcacttgcccaggaaacagaactgcttctattagatgagccaacgacgtatttggatcttgcgcatcagctcgagattcttcagctgttagaacggttaaacagagagcagggacgaactgtgttgatggtcattcatgatttgaatcatgcggcacgtttttctcattacatgattgccctcaatcaaggaaaagtcatcaaagatgggacgcctcatgaggtcatgaccaaagaggtgcttggtcaggtattccacattgatgcagaaattgtacttgatcctagaacaaataagccgatctgtttaacatatgacttaatgaatcatgaaagaaagctagaagctgtgaatggataataaaagtaaaaggaactcggtggaatagccgagtttttttgcgtctctgaaacttcctagtactgccattttctccagttgatattttttcgcttttatgcagaaaagaggtacttttttactttagacaatggtaatatacggttagagatcatagctagaaaggaaagagatgcgtggaaacagcaaaaatattgattgcagatgacgaagaagcaattgtaaaaatggttgaacgcgtattaaaaaaagaaggattcaagcatatttataaagcctaccatgcagatgaagcattagatgttgtcaaaaacgaggacatccacctcttacttctagatgtgatgatgcccggtaagtctggctttgatgttcttcctgaaatgagaaaatatacgaaagcacccattttctatttaactgcaagaacgtctgatgtagataaactgaccggctttgcgcagggggcagatgattacattacaaagccatttaatccgctagagcttgtggctagaattaaggctcacttaaaccgaacatatatctccttacaggaagagcaagaagaggctcaaaaccaatatgaatatgcccatttctcatatcatcctcattcagccgaactgaaagtgagaggagagatgacggcatgctcagctcagcttctatccttgctgaagtacttttgtgatcatccgaatgtggttctttcaaaagatcaaatctatgagaaagtatggggcgtcccgtcgtatggtgataacaacaccgtcatggttcatattcgaaagctgagagaaaaaattgaattagatccaagtcagcctgaatatattgtgaccatccgtggtatgggatataaatttattccgcaccctgtgaaggttcttaattaattcatgaatttacgaacaaaacttttctttcactttgtcggacagatgtttatcgtcattgcgattctgctgatcgggaatacgtttactgagaatctatattataaaaaatactatgagaatatgaccgaaactggtttaacaaaggctgatggggacacactcatgagctggctctattttaacgaggatggcaaaatggaagccgaagatcaactcaagcaagcagtgaaaaaacgtgacggctggctgcaagtgattgattcaaaaaaacataacgtatatagctatcaccttcctaaaaatattccaacatcctatcaaaaggatgaaatgatcaagatctttgaaaaaagacaatttaaagattacaagatgtacttctggccaattgagattgatcaagaaagctttatcgtgttatatgggttcaaaacgaacagcacaaaggtagccaattatcttaagcagcatgagaaaaatctggctgcactttctcaatattcgcttgaaacgatagaattcttgaaaagaatgaatggatcggtacacctgtttaatgaagaaggaaaatacttaaaaggcattcgagccaaaaacgatttgaaacataacgtaacagatgttgaattgcttaagtaccaatcgaagccttgggagtttagaagtgacctatcttatatcagagtgaataaaagtctatatttgatcgtttcggtaccaaacaaagtatatagcccagacgaattgtatgataaagagacagatgctttaaatcaatatagaaccatcttgattgcaggtcttgcactcactattattatcgtcatgacattatggtactcgtatcgctatggtctgccgatctatcacattatccgctggctgattttcttatctagaaataaattgcaggaaccaacaaatagaaaaggaattccaatcagtaaaaataaaaaaggtcgtattaagcgggaataccgattatttgaggatatcctaaaaacaatggatcagctcacgcttacattaaaagagaatgaagcaaaccgaagaaaaattcaaaccacaagggaagaatggattgcaggattgtctcatgatttgaaaacacctcttagtacgatttacggctatgggctcatgcttgaatctgatcaatatcaatggtccaaggaagaagtcatggaaatgggacaggtgattcgtgagaaatcagaatacatgtcgaccttgattgaggatttaaacctcacgtaccgattgaaaaatggggccttgcctattaatcgaaagccggtcgagctgggtgaatttttagcctctattatggacgagttttcaagaagctccttttctgaggatttttcatcctcttttgaagatcaaacaaacggtgtcatgtttgagatcgacaaagcctggttcagacgagtgattgagaacctgctggcgaatgcagtcaagcataaccaaaaaggcactcatattacagctgttttatctgaaacaaatgaagaagttcggatcgaaatgaaagacaacggatgcggaatggcacaagaaacggtagatcacttatttaaccgctactacagagggacaaatacaaatgacccaacgaatggaacaggacttgggctggcaatagcaaaagagcttgtcttgctgcatgacggtgatattcaagtggaaagcgaactaggtgctggaacaactattgcgattatcctaaaaaaatcaccttctgtaaaataggcaaaaaacgattttcctttcttaaggagatcgttttttcctgttttaggattgaaatcaactttgtaaacgattacaattaaattgttaacgtgaacaaattatttttcatacgataagagggatgggggaatttgatgagagcctttttagatgagcagtttttactaaacagtccaacggcggaaaagctataccatgagtttgcaaaggaccttccaattatagattaccattgtcatttaagtcctaaagacatctatgaaaataaaaccttccaaaatatcaccgaagcatggctttatggagatcattacaaatggcgtgccatgagaacaaatggcatccctgaaacgcacattacgggggatgcatcagatcatgagaaatttttggcgtgggcgaagaccgtacccatgaccattggaaatccactctatcactggactcatctagagctaagacgatattttgaagtcgaagacctattaaacgaaaaaaacgcagacattatttggaagaaagtcaatgaaaagctgcaaggagagggatttggtgcgagggacttcattgtgaaatcaaacgttgaaaccgttgtgacaacagatgatccggtcgattcgcttcactatcatcaaaaactgcgggaagaggaattctctgtacaagtgctcccagggtttcgacctgataaagcactcgatatagcgaatgatctgtttgcaaaatatgttcacgagctggcagaggtttcagctactccaatacaatcctaccaagacttcttaaaagcactccgtgcaagaattgatttcttccatgaacacggctgtttgatctcagatcatgctataaatgaaatgacatatgaagaaacgtcagaagaagaagtggagaccatctttcataaaagaatgtctggtcatccattgacggaagaagagaagatcaagtttaaaacagagacattcattatgctaggtcaggcatactgtgagcgtggctgggcgatgcagcttcatatcaatgcgcttagaaacaacaatacgaaaatgtttgagcggctcggaccagatacggggtatgatgcgatgaatgatgaggacattgcaaagccgctttgccgaatattagatcgtttagaacaagaagatgcattgccaaacaccattctctattccttgaatcctagggacaatgtggtgatatcaacattggctggaagctttcaagacgggaagacaccggggaagatgcagcacggcacagcctggtggtttaatgatacgaagcaaggaatgacagagcagatgatggctctttccagtattggactgatcagccgtttcatcgggatgctgactgattcacgaagctttttgtcgtatacaaggcatgaatatttccgaagactgctttgtgatatcatcggagattgggtagaaaaaggagaagtcccctatgaccttgagctgttaggggggatcgtgaaaggaatcagctatgaaaatgccaagcaatattttcaatttgaccgggcaaagcagctccatcaccaaagtaaaatcacatgaagaaaaaggtgagaaaatgaaagcggttttatgataagatggaaaaaaatcataaaaggcggaatagcatgacagtcacaattaaagacatagcaaaattggcaaacgtctctcatactacggtatcaagggctttgaataacagtccttttattaaagagaagacaaaacaaaagattttgtcgattgcaaaacagctgaattattcaccgaatgtccatgccagaggccttgtatcacaaaaatcgtttacaatcggtctgttttttacgagtttaacagaaggcacatcttcaagcttctttgtagatgcgttaaagggcgtcaatagcgtgatgactgagcattataatctgtttgtaaggggaattgacgactttcacgattacacaaccattcataaacagcgctacgatggcattttgcttatgagtcaaagcgagcacgatgaagcgtttatccatcatgtcaagaaacagggcattccaatcattgtgctgaatcgccgtgtagaaagtaatgaagtgatgaatatattagcagatgatagtcaaggagcatatcaggcagcgcactatttcattcagcaaggccatcatcaaatcgccatcattgaaggaaaagaaggctttaaatcgactcaggagagaaaagccggctttcttcaagcgttaattgatcaccatattcctatgaagaaagaatatatgatcacaggtgactaccacatgaaaagcggctatgaatcaatggaatccctcctgacccttgatcatccgccaacagcgcttttttgctctaacgatgacatggccattggtgcgatgaatgctttatatgcaaaaggcaagacatgtccaggtgatatctctattatcggttttgatgacatagcattctcatcctacaccacgcctgcactgacaacggtaaaaaagcctatcgaaaaaatgtgtgcacttggagcagaagccatcctatcagtcataaacggtgaagagcaggaagaagatcaaatgggaaaaatctatgtccacacagagctgatgatcagagattcagtcaaaaaggtgcagtaatcagcaccttttaaagataaatgttcacgtgtgcatatcacgaagagaggggaatccatttgaaacgtttatcaaaagccatgtacccggcgcctgagtatccggaaacgattttacagatcggtgaagggaattttatgcgaggatttattaattggcacatccagaagctgaacgactgcacagattttaaaggaagagctgttgttgttcctccgcgaaaaggatccgttgcggctttaaatgaacaagatggcttatatactttatgtatacagggctatcatgaccagcaagaaatgaatgagcgcatgatcattcaatcgatcagcagaggaatcagtacgtatacggattacgatggttttttatacgtagctgaaaaccccgatctccgctttgtcttctcaaacacgacagaggcaggacttatgttcagaaaggaggatcgcttggaggatcgaccgcaagccagttttccaggaaagctgacagcgttcttatatcaccggtttaaagcatttactggagatgaacaaaaagggctgatcatccttccatgtgaactggtcgaacataacggtgaccgtttgaaggaatatgtgatagacatggcagctgagtgggacctgccgcctgcgtttatcacatggatcaaagaagccaacacgttttgtaatacgcttgtggatcggattgttcctgggttttctaaggaagcagctgaaattgtccaaaaggaagatgggtatatcgacgagttgcttgtcacggcagaatattatcacctctttgttattgaagcacctgccttcgtacaaaaagagcttccctttcaaaaagcaggattaaatgtcctttttgtagaagatattgcgccttatcgcatgagcaaggtacgaattttaaatggtgcacatacagcaatggtgccaatcgcttactcatgtggtatagacactgtaaaagaagctgtggatgacaagcatgttggtccgttcatccggcgtatgctggaggaggaagtactgccagggcttgagctctctcaagatgagcttcttctttatacacaatcggtttgggatcgtttttgcaatccatttgtgaagcatcaattgctcgatattgcgctcaatggtatatccaagttccgaacccgagttcttccgtcattgcttgattatgttgagcaaaagaaacagctgccaatgaatctcgtgttttcactcagcagtctcatttatttttacagagcatatgcagaaaggataaaggatgatgagactgtaatggcatttatgaaggaagcctgggaaggggagaaccaatccaatgaagcgatcgcagccaggattctatcatgcgagccattatgggggaaaaatttaacggatgtagatgatttgagtcacgctgtagctgatcagcttaccttcatacaggagcaagggatgagagcggctgttcaacgaatgctgcatcatcaatatgaaagtcagggggagaaggcatgaaagattttattgtgattcacccttcagataatgtcggtattgctttaaaagtgcttgagcaaggggatgagctgcaccatcaaggacactctgttgtcttaaaagagaacgttcccaaaggtcataagtttgctttggctgatatcaagcaaagagagaatatcatgaaatatggctaccccattgggcatgcaacgactgccatttctgctggagaatgggtgcatacgcataatatcaaaaccaatctatcaggaaagctcgattacgaatacgagccttcattcacagacaacccctatgaaaaaacgaatcttacatttaaaggatataaacgaaaaaatggggaaagcgggattcgcaatgagctttggattgtcccaaccgttggatgcgtgaatggcattgccgatcatatcatccaaatattcaccgctgaaatgggcggaaacatccatccgtttgaaacagctctcgtattaaagcacaattatggatgctcccagcttggggacgatcatgaaaatacaaaaaccattttacaaaatgccgtgaagcatcctaacgctggaggggtgctcgtccttggacttggttgtgaaaataatgatattgaagattttcagtccacattaggtgaatatgaccatgagagagtgaaatttttaagaagccaagaagtaggagatgagattgagacgggagtcgctttactcaaggaaatttatgatgcggcgaaagaagatcaccgtgaagagatcccgttatctgagctgaaaatcggcttgaagtgcggaggatcagatggattctccggcattaccgcaaatccgcttttaggaaggctgtccgattttattgttgctcaaggcggcacgacagtgttaacagaagtgcccgaaatgtttggagctgaaacgattttaatggagagagcggaatcagaagcgactttcgacaatattgtgcaaatgatcaatgactttaaacaatacttcatggatcatcgacagccagtatatgaaaatccttccccgggaaataaagctggtggaatttcgacattagaggataaatctctcggctgtacacaaaaagcagggacttctgacattcaagatgtattgagatacggggaattgctgaagcgaaagggcctgaatttattaagtgcgccaggtaatgatttggttgcttcatccgcacttgctgcttccggctgtcagttggtcctttttacaacaggcagagggacaccatttggtacgtttgtccctacaatgaaagtctcgacgaatacagccttatatgaaacaaaaaagcactggattgactttaatgcgggagaactgcttgaagatgtaccagaagatgttgtattagaaaaattcatttcaactgtcattgatgtggcgagcggaaagctattaaatcatgaaaaaaacaattttagagagctggctattttcaaaacaggtgtcacactttaaggcgactgggggatgagaacgtgtttaaaatgcgggatttgatgtatatcacagcaggaacgatactcacaggaatcggactcacgcgtttagcaaggcaagagaagaaagacaaaaaagcaaacggaatcgatcaagtgttaaagcagataaaagcgccgctgttccctgatcgtgaatttaatgtggttcattatggtgcagatgggaaagggatagagctttcaacagatgctatccagtctgcgattgatgatgcgcaccgtttgaaagggggacgtgtgcttattccagaagggacgtttgtgacaggtgctctagaattgaagagtcatgtagagctgcatttgcatgagaaagcctatgtggcattcagccaagatccaaaggattatctgccgattgtactgacaagatatgaagggattgagctttataattattcacctctcatttatgcacaccatgcagaaaatatcgccatcacaggagctggaacgcttgatggcagaggggatgaacatcattggtggccttggaagtatggcacgaatggccagccgtctcaggaccgggatcggcagcttctatttgaaatggctgaaaagaggataccagtagaagaaagagtgtttggagaaggccattatttaaggtcaagctttatccagccctaccaatgccagcaagttctcattgaaggagtgacagtgaaggattcaccgatgtggcaaattcatcctgtgctaagtgaaaatgtcatcgtccgtggagtccatatcatcgggcatggaccaaatacagatggtgttaatccggagtcttgccggaatgtgctcattgaagattgttattttgataatggagacgattgtattgccatcaaatctggcagaaacgaggacgggcggagaataggggtttcatctgaaaacattgtcattcgtagaaatgagatgcgtgatggacacggcggagtgacgatcgggagtgaaatctctggcggggtcaggtatgtatatgcagagaataatgtaatggatagtccgaaccttgaccgggcactgcgtattaaaaccaactctgtcagaggcggtaccattgaacatatttactttaaaaacaacacagtcaaaagcttaaagcatgaagtggtctgtatcgacatgatgtatgaggaaggggatgcgggtccacatcgtcctgttgtgcgtcatattgaagtagaaggactgaaaagcagcggcggacgatatggtgtgaaaatagccgcctactcacattcccccgttacacacttcaacatgaaaaattgtgtcatagatcatgtgacgtatccactttctttggagcatgcagtatctccttcttttcagaaagtcgtcatcaatggggaacaaatcaattgatagatgagtgaaaaacagtcttttcggaggctgtttttcttttagtaagaacgaaaaagacgcttttagaaatcacatatacaacctatctgcactgtagtataatattcccgaaattagaaaagaattgacggaagagatgacgtcaagcagtacataaaccagggggttcattcatgaaaaagttaacggccatttggctatcgctattgcttgtgatgggtgttttagcaggatgtgcaggtgctgagacagaccataaagcaaagagttcacaaaataacgaaacagcggctgcggcatttcctgtctcgattaaagatgcagctggtaaaacagtcgaaatcaaagagcagcctaagcgtattgtttcattaattccaagtaatacagaggttgcctatgcgcttggtcttggcgataaaatggttggacgatcagattttgacaattatccaaaggaagttgaaaaggtagagaagattggcggacttgaattcaatgtcgagaaggtcatttccttaaagcctgatctagtattagctcatgcatcgcagatgggatcaaaagatggatttaaacagcttgaagatgcaggaattcaagtactgactgtaaatgatgccacctcctttaaggatgtgtacaaatcgatcaatttgatcggtgaagcaacaggtgtaaaagaagcatcaacaaagcttgtagatgagatgaaaacaaaattgaatgacatcaagaaacaagcagaggcgatctccaaagacgaacaaaaaacagtctttgtcgaagtatcaggtgcgcctgaaatctatacaacaggtacaaatacatttatggacgaaatgctttctgttatccatgcgaaaaatgctgctggcgatcaaactggctgggtgcaaatgacagaagaagcgattatcaaacgaaatcctgatgtgatcgtcacaattgatggttccagcttagctgatctgaaaaagagagacggctggaatgcgatcaaagcagtgaaggaaaaacaagtctttcaattgaatacggatctcgcatcaagaccgggaccgcgattggttgaaggagtcgaggctcttgcgaaaagcatctatcctgacacgttcaaataaattcatcatcgcatacacactaagtgttttacttcttgtggtgagcattggaatgggaatctcctttggaagcttagggattcccattccttctattctccgtatatttgttcatgaactattcggggtgcagattggcacaatagattcaattgatcgcaatattatgatgaatatccggctgccgagagtgatattagcggcactagtcggagcagcgctggcgttatcaggtgcagcctttcaaggtttattaaaaaatcctctcgctgacccatatacgctaggtgtatctcaaggggcatcagttggagccgtcgcgacactatttttcagcttgcagctccctttgctcggcagtttcacactgccttttttcagtatgacaacagcgcttgtgaccctatgtctcgtcctcttttttgcgcgtcttgttcatcgggggatgagcatctcttctttaattttaacaggggtgatttttagctcttttttgagtgcgcttatatcattgatgattgctttaacaggtgatgatctaaaagagattattcattggcttctcggcagtgtgtccatgaggggctggcgctatattgcgcttttccttcctttctttcttgtggggacctttgcattaatgctgatgggacgagatttgaatgtcatgacgtatggcgaggagaaggcacagctattaggtgtacatgtgaaaaggagcaaatatatagtgctgcttgctggctcaattctgactggtagtgcggtagcggtgtcggggacgatcggatttgtgggacttgtgattccgcattttattcgcctcttagccatcacagaccaccggcacctcctgcctttgtctatgctgaacggcgcttcctttctcgtcttagcagatgtgttatcccgtacgatcattgaaccgactgaattaccgattggcatcattactgcgttaattggtgcccctgtattcggcatcatcctcatccgtaaatatagaggagggacacatctatgattcaagtgaaggaaatcagaggtggatatggagagaaagaggtcatacgtggcatcagtcttgaggtaaagcaaggagaatttctcggtatacttggcccaaatggaagcgggaagtcgaccttgcttaaaatgatttctgggatgctggcacctgagagtggcgaggtacgcctgagcggtcaattggttcaatcctaccgtccaaaggcgtttgcgcaaaaaatggctgttctaccgcagaaaacggaccaagccttctcatttacagtggaagaaacggttcaattcggtcgttacccatatcaaaaaggatggctgcaatctgttactcgagaagatatgcaggtcgtaaacaaagtaatggaacaaacggatgttgcacaatttaaggatcaatccattcatgagttgagcgggggagaacagcagcgtgtgtacttggcacaggcattagcccagcagcctgaatatttattgctggatgaaccaaccagttttcttgatttggcctatcaaaaagacttgcttgatttaattaaagaagagaccacttcctctaggctaacggtgatcggcgtgtttcatgatgtgaacatcgccagtttatattgtgaccggctgctgctgcttgatgaaggaaagacggaaatgataggactgccgcatcacgtcttgacgcctgagcgaatcaaccgtgtgtatgaaacagaggtaacaccgctccaacacccgcgaagagcaaaccctcagctgatcattgagcctgcgggggcttctatagcatcaaatgcaaagttagcggatggctggaaaacgtatggctcagaaggaatgacgttttccctcaaacagccgctccgcgtcctttcctcacatcagaaaaggggcggcttcttttggaaaagatctctcggaacaggaactgagatacttcgtgacgagctggatgatcgtgaaggaatattgttttacgaccaaacgagtagaccaaaccaatttgctgctgaagacacagaaaacgacatggtgctttacggcatgcgtcatcaagaagagctgaccatttggcttgtactgaaagaatctttatcagacggatcgtctgttcagctcatggggcagcttgtccacatgattaaacaggagacgagcatgtccattcatcatctttgtatcgctgctgcgggtatgcaggaaacagaagatgatgagcatttacatgaaagattaaaacagaaagtgcaccgtcttctttatacattgaatgccattcaaaagtgaaccaaagggttcgcttttttgtttatgatgcgatgaaaatcacagtgctttagttaaacaaatacatccttttcacttcaggttatactaaaaggacaaagcaatagacaaggaggaacaccgatgaaactttatacaaaaacaggggatcaaggccaaacaggcttgatcggcgggagagccgataaagatgatgtaagagtcgaggcgtacggcacgttagatgaggcgaatagcttcattggactcgcacatgcacatttacgtcagcatggagaattgtttcaagacattttgtcagagctgattgtgatacagcacgagctctttgactgcggcggtgatttggcagcagtcaaaccacgtaaagaaggcaaattaactgaagcatcagtggcagtccttgaacaaagaatggatatctatgtagaagaagccacgcctctcacaaagtttattttaccgggcggccaggcaggagcagctctcttacatgtggcgcggacagtcgtcagaagagcagagaggcatattgtgacgcttgcgaagcaggaggagattccagcggttacactcacctatgtgaaccgtctatccgactatttatttgcagccgcacgagtcgtgaatcatcggctcggtgaagctgatgttgaatatgaacgaagcgcagacgtgtttcggtctacacgctgaaaagaagacaaagggctaaaataaagatcattttagccctttgtcaacaatctgaagcactcttcgaatgagaagagtgcttttttattaggttctatcgcttagtctgagcgaagttacgactctggtcgcaatgaaagatcaatctgcgacacgttttgccagctctcttttttgactaaagtaaaagcaaggagcaagaaaggaggcatgaagatgaaaataacaagtaaaaccatcatcggttcgattttaatgtttgtcggtctatccatcttcttcggtggttcactaggagggctgatcccgattctgattggggcatggctcatctatgtaggtgtaaagaaatatgagaaaggcagtcaaaccttcggtgtcattctagcggtcattggtgtactgattgttgtgcaatctctgccatttatccttggaatcgcattggctggggggcttctctacttcggctggacgatgatcaatggtgaacaggcaaaagaatcatcaagcagatcatatatggagccaaacacggcaccgaaaatggaagaacctattcacacgtcatttgatcaagaatgggaagactttttaaagaaaaaataagaggaggaatatcaaatggtattcagaagagtaagagatatgtttgttgcaacggtcaatgaaggcttagataaattggagaatccgcgtgtcatgctgaatcagtacgttcgtgatatggaggacgatattgccaaagcgaaacatgcgatcatcaaacagcaaacgattcaacaaggcttcctgcacaaagcagaagagacagaagcatttgctgataaaagaaagaagcaggctgagctggcatatcatgcgggagaagaggaacttgcacgaaaagcgctcacagaaatgaagtattttgaagaaaagcaccaggaatatcaggaagcttatcagcactctgtgaaacaattgaaagagctgaaagagcaattgcagcagttagaaacgaagctgcgtgatattaaagacaagaagcaggctctgattgcaagagcaaatgctgcacaggcaaagcagcatatgaacgaatccatgaacaaagtagacagtgaaagtgcatataaggaatttcttcgaatggagaaccgtatcgaagaaatggagacaaaagcgggcagctatgcacaatttgccgatcaaggagcatatgctcatctagactatgcggatgaggttgaaaaagaatggcagaagctcaagctggagaagaagcctgagcagcaagcaaactaaggaatcgatgtcagatcggaagaaaagcaggatttttcttccgatatttgatttctttctgtttcgcttttccttataatgaaaaggtcagaagataaaaggatggtacgaatgaagcggttaatcggtctaatttgtatacttgtaggtgtctttttaatgattgggatgcttttcaaaaatgaagatctctttcatttgagtttctcccgtgaaaaagcagtcacaacagcttcagcgaaaaaagatgaaattgatcaattagatatctctctttctgggtttcgcgtgaaggtaaagcctgaaaatcgttccgatatttccgtgattgtcgttaatgggaaagggaaaatgtatgcggaccaaacaggcagtacattcaacgtccgtgctgaaaataaaggattcttgtttttctcctcatttgaaaaaggagaactcttagtcaaaattccaacagattatcataaaaatgtgaagattacgggtggaagcggggtcagcgagatggatggcgaagggaagctgtctcttcaagatgtgacgctcaaatcaacaagcggaaacctcaaagccgagaatttctcagcaaaaaatgtagaaatcaaagcgacatcgggcagactctccgtgtctcacatcgatgcgaaaaatagtgatattggggcaacctcgggacgtgccgatattaaagatgtaaaaggggatctgcaactaggcatgacaagcggtagattaacggcaagttttgataccattgcgtcacctgtctcctttcatatgacatcaggcagtgccaaatttaatttaccggatgaaggagatttcaatgtccgggtgaaaaaaacaagtggcagtgtcgatcattcctatcaatttgatcaagtggatagtgaagggcgcggatttacaggcacgcggggaaaaggaacacacttagtcgatattgaaatgacaagtggaaacttaaagctgcggtaatgaatggaagaaaggaaggaggcgagtcaactgcgtttttcaaggaatcaaattttaggcatcattgtcgtgatttttggtattaatctatttctcaaaattattgggatcggagccgatttgttttggcctgtgttttttgcgctggctggctattggctgcactcaagatccaaacgttggctcggttcagtttcctatatttttgccggctttctctttttaaaatttctgctcaatattacatttagtctaacaggatatttatttgcggcctttttgatatatgccggctatcgtttattgaaaaacaaacccgtttttgatgtcgataaaaaggaagcatcggacgatggaaagccttcgctgaaagtcaatcttgaaaaagagggcgaccaaaagaaaacaaagagccagacaaagccgcgcaaagagcatgacttttttatcggtgaggtcaggctgatgaaaaagccgtttcaattaagtgatttgacgatttcagggtttatcggggatgtcaaaatcgacttatcaaaggccattatcgcagaagaagagagcacgatcgtgattagcgggctcatcggagatgtggatatttacgtaccgcaggatattgaagtatgtgtgagtgcttcagctgcaattggtgatatgaaaattatcgatgaaaaaagaagcggattcggcagtaaagtgtatgtgatgaccaacaattacgatgagagcaaacgaaaagtgaaaatctccatctctttactgattggagatgtggatgtgagatacttatgaggaaactccatctaggtatccagtggcaatctattcgtcttggagtagggatctcgcttggtgttgtcatcatgacgatgctgcccatgtttttttattatcagcttgatccgatgattctcctctctacccgctggttcggcattccgtttttttgtattttactgatcattagtcttgtcattggggtttctgcctcgcatgtatttggctatcagcataagaagcgtctcgatcagcttgtagagtcgattttaaagtttgaaaatgggaactttgcatacagactgccgtctcttggcgacgatgaaattggcttagcggcagatcaattaaatgaaatggccaaacgagttgaagggcaagtagcttctttgcaaaagctctcgaatgaacgggctgaatggcaggtgcaaatgaagaaatccgtcgtttcagaagaacgtcagcgtctagcacgagaactgcatgatgcggttagccagcagttgtttgcgatttcgatgatgacctctgcgattcttgaaggcatgaaggaaaaggatgaaaagattttaaagcaaatgcgcctagtcgaacgaatggctggcgatgcacaaaatgaaatgcgtgcgcttttgcttcatctaagaccgatcacccttgaaggaaaagacttgaaaaaaggcttgattgaactcctaaatgaatttcaagcaaagcagccgattgatattgattgggaaatagaagatgatgttccgctgtctaaaggagtagaggatcacctcttccgaattgtacaggaagccctatcaaatgtgttcaggcatgcaaaggcgacaaaggtgacggtacgtctgctcattcgaaatcggcaggtgcagctgaagattatcgacaatgggatcggttttcaaacagatcatgtgaagacagcttcctacggacttgaatcgattcgtgaaagaacaagtgaagtaggcggtgtcgcagagattatgtcatttgagggaaaaggaacacaaatcgatgtgaaggtccccatttttgatgaaggaaaaggagagaacgttcgatgattcgagtacttttaatcgacgatcacgaaatggtgagaatggggcttgctgcctttttagaggcgcaggctgatattgaagtcattggtgaagcgtcagatggacaaaaaggtgtagagcttgcggttgaattaaagccagatgtgattttaatggatcttgtcatggaaggaatggatggcattgaagcaacgaaaagaatttgtcaggaaattgaagatgctcgaattatcgttctgacgagctttattgacgatgataaagtctatccagtgattgaggcaggtgctttaagctatttattaaaaacatccaaggcaggagaaattgcggatgccattcggtctgcaagtatcggcgaaccaagacttgaatcaaaagtggctggaaaggtcatgaataaactccgtcattcctcaaatggatcgatccttcatgatgcattaacagcaagagaaatggaaatcttgaagctgattgctgatggaaaatcgaataaggtcattgccgaggaactatttattacaattaaaacagtgaagacacacattaccaacattctttccaaactcgatgtagaagaccggacgcaagcggctgtgtatgcgcatcgtcataagctgattcaataaaataaaaaaacagctttcaaatgaaagctgctagaacatgcgtaaaattagtccttctgtcctgtgatcggacgttcggatagttgatggagctcaggaactggaaaagcctcctgctcctcggccgatttgtcttctagggctttcttcatctcggataatagctgtacgctctcctttgccactgctgcttttttctcctgcaaaccaatgatctgtgaaagtccgacgaataaaccgcctccaataagaaggagcgcaggggtttgtccataataaatcacgatcaaaaatgtgctcgaaaagctgtcggcttcaatgaagaaatcttcttttgattgcatgaatacaacgactaacaggagtattcctagaatcaaaaatagaatgccggccgaaagtaaagctcgtttcatgattgacaccctttttttcttaccattttaacatactctatcaggattgtgttgcgcccttagtcccgaagtcacggattttcacatttgctttgtaacgaatatctgattcactaaaaatctcatcccaatgttttgcttcttttcgaaagtcctttgggtaggcaatactcgccttttggtaaaacccgcaaatatctgctttaatctcatgctgtaattctccgatgaaatcctttacgtttttctctaatcgacgcttgacaacgccttcaatttctctgagatacttttcattaaaagcgttttcgcgttcattccaatcctcagacaatcgcccatcaagatccactgacacatcaaattgatattttccactggctgatttatgggttttgatatggtgcttgattttgaaaatctcaaaagagtagaggctgtgatcatattcaaattgtatgactccgccttctccgtccccagttaataaattgtatgactccactgctgacggagagatattggtgagaaatcgtctattcttaataatagaggcaccgtcgatcattaattttccttgatcgacgctgactttcggaagagcaaaggatacattgttttgcatggcagaagaaatatctcctaatgagaccgtcttgaacatggaaatggtcgtttttctgttttctgaaagatcgtataaggtcgaagaggctggctgtccgtcgtcattgattttcagcatgtccccaggtttctcagaggtcataaagacgaggctgcctctccgcgtttcattgtctcgaatgaattgattaatgacgaggtcaaaattattctcattgatgagctcctcagaaaataaatacacccttagctgctgcgcaaaaatgcggtggcttttcagcgccgttgtgcggaaaatttgatgcatagaatccccgcttgtttcaatgattttcgtagggtctttgatgcttgcttcctgatcgatcttttgaggaacgaggacttgcatagacagctttaatttatgtccttggtcccctttatctactgcaaacccaatcgccatgttgagctcctcaatatttgtactatcccagcaaccacttaatagaaccagcatcaaaagagcacaagctgccttctttttcatgctgttttccgcctccttttgaaaaaaacgattataaataagagaaacgggagaatgccgaacagcaggaaaaagaggttgttcacataggttaaataatctcgcactgtatcgacatcctttgggaaaatcgctgcaaagtaaatgacaattcccattagagcgacgactacctttttaggaaacttggtcagtctggataccccgattgcggcaaaaaatgtatatccgacaaagcttgtatacagctgaaccagccaaacgataagcaaaaatgattcaattcgttcaataaaaatcccctgaatatcaaacgattggaataaggcaatggtcggccaagtcaaagtcgccgtttctttgaccgtcagcgcacctatcacaagaatataagtgaaaatataaataatcgcaggaatcaaaaagccgactgttccataagcaaaagtgtgtttttgcgtgttcatataagcaggcataaacagcatcatttcaatgccgacaaacgatatggctgatgcattaaaggaattgaagacaggggagaacccctctcctaaaacgggccggaggttatctaacttaaattcttgcaagctaagtccgtaagcgacaaataagatgatgagcgtcacaatcaaaataaaaggaaaaagcctggctaaatcaccaatcccgccaatcacaagataaaaaccaactataataaagctgatcattgtcaccgctacaggcgtgttttgaagcaaaaagaatttcaccatttccgacatcgctcgtacttcatagctggcgacgccaagaaaataaataataatcaagaggttggcaagagcgccaatccattttccaagcccctcgttcgtataatcataataagaggagaaggggacttttttcatcatgaggacatttgcaaaaataaacacaatgtaaatgacactcatgagtaagagtgcaatccagccgtcaggtgtagccgcagcctgagccattgatcttggcagaatcatcatacttgcgcctagtgttgtattggcaataatggcacttgcctgatagctggtaatcgactctttatgattgaccatgtcgttctcctttctgttgattttttaaaggcaatcgaataatggaattgtcttcgtttttatagctgaacacaaaatctggtgagaaataaggcgtgccaaaacttttttgccgcgtgagatgagtaaggagtacaagcataaacagcacaatcccatataaaccaaaggtagccgcagtaaacatggacacaaagcggagcacgcgaaaggacatgcccatcccatattgaggaacagtaaaggatgcaagtgcaatgacactaacgataatcaccatgattgagctgacaatatgtgcctgaacggcagcctgtccaatgacaaccccgccaacaagtccgatcgtttgaccgagcgggtttggcagccttaagccagcttcccgcagcagctcaatggttatctccatgatgagtgcctcgacaatgggtgaaaacgggacattttcccttgtgctcgagattgtaatagccaaagtggttggcaaaagaccttgatggaacgacacaagcgcaatataaatggctgataaaaataacgtcagaaagatcgaggtaaatctcagcaaacgaataagagaggcggcgatccatctttcataataatcatcgggtgattgcataatcgtcgcaagggatgcaggtacaattaacacaaaaggtgaatgatcgacaaagatggcgacccggccattatttaaagcagatgccactttatccggccgttctgtgttttgaatttgcgggaaaggagaatacacattgtcttcaatgagctcctcaagaacaccagagtcctgtatatcatcaatggtgacttgcttgagccgttttttgacttcctttaaaacaggcacttgaacgataccgtcgatgtacatgatggtcacctgagtgtatttctgtagaccaatcttcatatcgacggttttgagatcaggatttttcaagcgctgtcttacaagcgctaaattcgtatttaaatcttcaataaagccaatttttggtcctctcacgactgtttcagaggtagcatcccctaaactgcgtttcttcgttccatgcgtttctaaaatatacgcatgctgaaatccattaatgagcaccacgcaatgcccttcaaaaatcgcatcgaccaattgttcagaggtcttcaccgaacgtgtagtcatcatcgataaattggattccagcttctcttttgtgagagacgtatgatcttggagaagcagcttcaaaaaggtttgaatctccatcttttcgttcatttcttttatgtataaatagtaaacaacttgcccgtgaggcagcgtttttttctcatgaaccaaatcgtccatttcctttaattgcgggagaatgacggagagattatcgtataagtgctctttcaatggagtctgattcaaaaggatcacccgcctcaataactttttcttagcattacctgcttgaaaaaacaatattctgtgttacattattttgtggtaaaagaaagaatgagggttttggaggaaacaagatggcgcaaattcgtttagcaggaacaaaagaggagattgaccgtattctacagtcgtttgacaagcattatgaagtgacatatacatcaaaggattacggaaaaacgaacccaaaatacaaatattcgaaagatgtccgcgtttatattgaactaaaattaaaataaagataaaattttaattgaaaacgcttaaaggattttggttttttgtatagaatagagttgagtgatgagaagctatggagggatacataatgacggaatttagaatcgaaaaagatacaatgggcgaaatcaaggtgccaaaggacaagttctggggtgcacaaacacaacgaagcaaagaaaatttcaaaatcggttctgagaaaatgccaaaggaagttgtgaatgcgtttgcaattttgaaacgtagcacagcgattgccaacgaacgtcttggcaaccttgagagcgaaaaagcagaagcaattgctgctgtatgtgatgacatcatcagcggaaagtatgacgagcatttcccgcttgttgtatggcagacaggcagtggaacacaaagtaacatgaatatgaacgaagttgttgcaaatagagcaactgcttacttgaaagataaaaatagtgagttcagcattcatccgaatgatgatgtcaaccgcagccaaagctcaaacgacacattcccaactgctatgcacgtggcagctgttttagctgtgtataaaaaattattgccggcgattgatcaattaagagccactcttgatgagaaagcaaaagcgtatcaagagattgttaaaatcggtcgtacgcacttgcaagacgcaacaccactgacagtaggtcaagagattagcggctgggtgtacatgctggatcgttcaaaagaaatgatcctagaatcaactgaaaaaatgagagagcttgcgattggcggaacagctgttggtacagggattaacgcacatcctgagttcggacaatatgtcgctgaggaaatcagccaactgacaggtcaaacattcaattcttcaccaaacaaattccatgcgctgacaagccatgatgaaattacgtatgcacacggtgccctaaaagcacttgcagctgatttaatgaaaattgccaatgatgtgagatggctggcaagtggtccgcgctgcggaattggtgaattgatcattcctgaaaatgaaccaggaagctcaattatgccaggtaaagtcaacccaactcaaagtgaagctttaacaatgattgcagcacaaatcatggggaatgatgcaacaatcggttttgccgctagccaaggaaactttgagctgaacgtatttaagccggtcatcatttataacttcttacaatcagttgaattacttgctgacggcatgaactcattccatgacaagtgtgcagttggaattgaaccaaacctagaaacaatcgagaaaaacttgaacaattcattgatgcttgtgacggcactcaacccgcacatcggatatgaaaatgcagcgaaaattgcaaagcttgctcacaaagaaggtttaacattaaaagaagcagcacttcaattagagctcttaacagaagagcagtttgaagagtttgtgaaaccagaagaaatggtgacaccgaaagcaaaataagaaaccaggggcagcagcccctggtttttttcattgagagtatcgaacaaaatgaaagtccagggactgccctgggttctacaaatgatcctctttcaaaatacgcaaaagtgattcagagttggtttggagcggtgcgtataattttaattgatacagcatgccttttacgatgacttgtcttggtttttgtttgtttaattcaatttctaaaatgccaagcgcttcaaataaatctggctcgtctttcacttcatagtgtgcttcagcctgctctcttaattcttttaaaagagattctgtcagcgggtcgaatgaccgttcgtaaataggaccaaaccaatcgctcgcttgatctacagagatgagcgggatatcatttcgctccatcataccgcccatcaaatcatcgatacggtgaatcatcgttgcagctagctcctcagcctccagctgaaaatcatataaaatcgcaagctcgaaataaacgtggctcatgccctcaatcgtcaaacaaagatcagccatataaggaatcgctgcatctccatatacctgcttaatgttatcaatgtgaagctgaatggtggcaagtctgatttgttttgcgagcagctgcgtttcttcattcattggcagtgctcgatcgctcagctgcattttaataaaatccttttgctgtaaaatattatcgtagtagacagtgagctgctttcggtaggcttcctttggtgtgccgccctctgtttgaacctcgtgaatccgggtaaataccttatcataatagtaatgcaagattgaaatgagcagtgcttcctttgatttaaaataaagataaaaagcaccctttgacatgtggcattcatccgcaatttcctgaacagacgttgtattgtagcctttgctggcaaacaatttcatgccggcctcaatgatcattttttctttctttttcaatatgaatgtcatcctttcttaccgagagacaaatgtcttaggaaacgtgcgcaaagagatgtgacttatcggtcataaacgacgaaagttttcaaaaattaatcagattgtaacttgttttttacagtgtaattctttatattataaagtaaggtgaccaactggtcaaaaaatgtgaaaggatgatgttccatgagagaaatcgatgatatgatgagacgcttgcgaacaaaaggaatacaagtagaaaaagtcaaaatgccgaaagagacaaccattgaaaagaaatggatgtatcaagctggcaagaaaatcaaagccacataccgtgatttcaatgggtattcattcatctaaaaaagactgcggtcaaaaacctacagtctcttctttggaaccgtgatcgtataacgtacacctagatcatcattttcaattgatatagacgcttgatgcatggagagaatttttttgacaatgcttaatccaataccgaattcgcccttttttcccttactaaaaggttcgtataggttggatagcatatgttcttcaatgtgaggaccgtcattacgaatgacaatgcatatttgatcctcttcctgtttcatttggatatcaattttactttttgcgtagcggagttgattttctagtacattctcaaataatttgctccattgttctggatcgccttcaagagcagcctcatcatctaagtccacgttccactgcaattcatttttcgaccagcgtattcggtcgaccacttccagcatcgtattactgagtaggaaggaagcatgtgcggggtgttgttttgataaataatcaagctttgttaagtacagcaaatccttgattttcttctcaagtttttccgcttcaccttcaatgacttccaccgtttgttcaagatctcccttaggaaaaataccatctttaatcgactgcgtatagccgcggatgaccatgacaggtgtctttaagtcatgtgatatattttgcaaaagagtccgttctgtttcatccttttgaatgagcttttgtctcatttcttcaatggtatgaccaagcttcccgatctcatcttgccggtcaacgatgacagggtcgtcccagtcctcttgcgcaatccgcttcacgtgcttttcaaatgcaacgattggacgggataagtagcgggcaagccaaatcgatggaatccagcttaataaaataacggtgcccaggataaatatcagctgtttaaacagcgtaaaggacaggtcgtctcgataagagtctggtgcataggacagaagaatatattgtgtattgtctgttgatacttttttgatgacaaaaaagatgtgctggccatttacctcttcagaatagcgtttcgttgcgcttttttgttttttcacaaaggcttggattttctcaataaaggcgtgcgggaaaaactgcgccatttggtttaattcatctgacggaatcagaatgtgctgcaccgagcggttttccggtgtcgactttggcgagccgtctcggttcaacggatattctgtgagcacctgctgttcattttctatatttttataaatttcattcgtgaaaaagtttcgtaatgtattggaaaataggatgatcaggacaatcgagatcgtgagcaaaataccagagatgacgacccaaatttgaaaagcgagcggtttgttcttcatccttttagcatcctatagccaaatccatagatggtctcgacctttaagtcgggcatttttttgcgtagccgtctgacaaggtcatcgaccacacgatctgttccgaagtaatcgtgtccccaaattttgacgaggatatcttcacgagaaaaagcatgtccctgatgatgtgtaaataaaagcagcaagtcaaattccttagaagttaagttaatcagctgatctccttcatacacctctcttacatcctcatgaatgacataggaggagacgggtgtgacgcttttctgctgcggagtatcgctatttttgtacacaagctcaagcagcttttgcacccgaatgatcagctcgcgcggaagaaatggcttcgcaatataatcactgcttcccagctctaagccgaggacacggtcgatatctgcatcgcgtgccgaaatgaaaatgaccggtacgtcaggtgatgcggctttgatttctttaatgagtgtgtagccatctgtatcaggcagcatgatatctaaaatccatagatgcggcggcttgttcattgcccggcgtgccgcttctccggttaaaaaagaggagacattccaattttcactttctaaatatttggttaaaagttcgtttaagttttgttcatcttccactaaataaatggtgtacgacaaagtcttccacatcctctcaacgtcattataacgggatacaaaggcggcatgtcaacaatcacatgcttttttcacaatttcacatattcttctcatcattatcccataatgtttgtttatgataagctcaagggaaaaaagggcatagacaaaaggtagataaataggtgcttttcacgaatgtgcgcaccttgctttttttctatcaataagtattatataatttgacatattgtcatgaagtatcttcaatgatattgccattaagaggacatgagtcctatctaaacatatgaatcaagcaagtcatgaacacgatgtaaaggagtgcaagcgatggatttccgaagagaagatgaagagaagaagatgaatcatcaagaagatgtgcatcaagagaatgagaaacaaatagacgaaccagaaaaagaaaaggaactcgtttatcaacctcatgaaaacgaagcatctgccactcaggagagtgtgacaaaccattctcctcaaatggaggatgaccgtgcgtcgaaaaaggagaaaaagcggaaagcggcatggctcagtccgatccttggagggattattggcggaggccttgtgcttggcattacaccgcttttgccgcagtcacaggacacagctgcaaacacacaaacgcaaacagcttcaagtgagccggcagcttctgataatttctcaacaaaacaaatcaccaatgccacgaatgtcgctgatatggtagaagatttagagccaaccattgtaggagtctcaaactatcaatctacacaaaattcgtttggccttagcggtgactcaacagaagctgaagctggaacgggttctggtgtcgtctttaaaaaagatggcaaaaaagcgtacattattacaaataaccacgtagtcgagggtgccaataaactgaaggtcacactttatgatgggaaaacaaaagacgcaaagctggtcggcaatgatgtgatgacagatttagctgttgttgaaatcaatgcagacggcattgataaagtggcgagctttggtgattcttctaagctccgtgctggagacaaagtgatcgcaattgggaacccactcggtgcacagttctctggtactgtgacagaagggattattagtggtcttgatcgtacagttgaagcgaacacatcatctggtacggtggaaatgaatgtactgcaaacagatgcagcgattaaccccgggaacagcgggggaccgcttatcaatacagatggtcaagtgattggcatcaacagtttaaaaattagcgaaagcggtgtggaatcacttggctttgcgattccaagtaacgatgtcaaaccgattgtagatgagctgttgaaaaatggaaaggttgaacgtccttaccttggcgtacaaatgattgaccttgagcaagtgcctgaaacgtatcaagaaaatacgctcggcttatttgataaacaaatcggcaaagggatttatgtaaaagatgtatcaaaaggatcacctgcacaaaaagcaggcttgaaatctggagatgtcatcatcaaattcaaagggaaaaacgtggcaaacagctctcagctgaaagaaattttgtacaaagaaacaaaagtcggcgataaaacgacaatgactgtcattcgtgaagggaaaaataaaaatctagacattacccttggacagtctgaaaccgaataaatgaaaaaacaggtggacgttaaaggtctacctgtttttttatgcttatttttttgaagagagtgtacgtaatatgatcttttcccacatgctccaaggcaagagctgctttgctgtgaatgaaagtcgcacccctttcccaatcggatatctcaactttttcagccgtttcttctcggctaatcgaatcacaagctctgcgacttcacacgggtcaccgtagttggttttctgggcattgatataaaccatcatcttttgatagatgcttgtgtatttcgatccttcccctggctgcaacatgtgctcgttcatagacgtgttccaaatatttgtttggaaagagcctggctcgatcaaggctgcctgtataccgaacgatgccagttcaatgcgcaagctctctgtgtagccctctaaagcaaacttggaggatacataaggagaaagtgcgggcattcccattaatccgctgatgctgctcatattgaatatctttgcaccatttgtcatcagcggaaggacggcttgtgtcacttccatgactccgaaaacattgacatcaaattgctggcggtacgtgtcaacaggaacctcttcagcaaaacccgcataggctgttccagcattgttgacaagcaaggtaatgggggcgtaagtatgcaactttttctgaaatgcttgaattgactgcgtgtctgtcacatctaatgcttcaatatgtatcgcttcggctaacgaggcttgctcgatttcttcagcaagctttttcgcattggcttcctgcctgacacctgcaatcactgtatagccttgcttggcgagaccagtcgtgatgagcttgccaaagccgctattggcaccagttacaatggctgtccttttcatcatctcgtacctcctttttgtttcaatttaccatagaccgctcttttattgaataacgaaaagaaggatggagaagaataaaaagcgatgataagaaataggaggaagcgcatgatgtgttggaagaaggcgggacaaataggagtgctgctttttatgctgtctggctgccaatcgattgagccgctccagcaaacaaaggaagcagaagcagagagtctctcagcgattcaaatgaaggaacttccatttgagcatctccacctgcatgttcaatacgggcagaaaagcgaattatacgaagccacctatcgtcaggcgaaaggaaaagaagaagcactgattcgtgatcatatgaacggtgtccgctatgaaggtgaagaagctttacgcgagatgaagatgaagctaaatgatatgtcgattcctagtgcgaagatcaatgaaacgtatgtcaatgagctattagctgcttttaatttagacgatgattatcagcgaattcaggtcgatatgaagcttgaagatgggaccaaacgtacattccaaaagaagaagtaaaacggaactttctcattttttaattgaaaatgattttcaaaatcacttaaatctgatacactaaattgagataagtgatcttttgcgtctatatatagacgatattcaatataaaaatttggatgagaaaaggagcgtttgagcggaatgagtgccatttctactgaaggtttaagcttaggctacggagaaacaatgatcatagatgaactaaatgtatcaatccctaagggtgaaatcacagtatttattggcagcaatggatgcggtaaatccacgctacttcgctctttggcccgtcttatgaagccaatgggtggttctgtcctgcttgaaggtcattccattgccaaattaccaacaaaggaagtagcgaaacagctcgccattcttccacaaggaccagaagcgccagaaggattaaccgtgtatcagctagtgaagcaaggtagatatccttatcaaaattggctgaagcagtggtcgaagcaagacgaagaagcagtgaatcgtgcactgaagtcaacaaagatggaagacctcgctgatcgaacggtcgattcattatcaggtggacaaaggcagcgtgcatggattgcgatgacgttagcgcaggagacggatatcattttgttagatgagccgacgacgtatttagacatgacgcatcaaattgaaattctcgaccttctgtttgacttaaatgaaaaagagcagcgcacgattgtcatggttcttcatgacctgaatctcgcatgcagatatgcgcatcaccttgttgccattaaagacaagtcgatttatgcagaaggaagaccggaaaccgtcattaactgtgatctcgtgaaaaatgtctttgatatgaactgccaagtgacaacagatcctttattcggaacaccattatgtattccgcacggcagaggacgttgtattgtacagcaggcacaagccgagacatttcttgctgcaagataatcgtatgtcaaaagcctgacatctgttacgtacagagtcaggcttttttctgaaaaaggagcggaagatcaatgggaaatgaactagatgaaaagctggaaggcttgcttgagaaatatactgagctactccttggcgaatcaacagacgcactgaaacaagatgtgaaacaatgggtgatctactctcatatcgcaaaaagcatgccgcctctagcaaagcactttaatgaaacgtatccagaagcaaaagaagaaatcaaacacacgattcaacgaatcaaacagttgaacgaagctcaccgcgccaataaaggtaaattttaagataaataaaaaactaccccacacgaagaggtagtttggtgaaattacttttttttaatgccaaaaaacaaaaggagaagagataatataattataatgtaaataggtgtaatccaaatttcataaactgagtttggattatcttttacaaacccagtgtctatgaggatgtaattccatttgatgctaatcggattatctacttcgtatgaaaaatcatttaagtataatttgggttttgttattctaaatattaaataaattaaactacctagtaataaagtgatagctataaggattttcttcatataggtcacatcttttcactatctttttcttccacctgaagttgtttcaacaaatttatttacatactttgttttaacaccatctaaaattctatctgctttacctgaagtgtaagttcgtatgcgaactttttttcctttagatactgtatcagcaacaatttgagttaactgaacatcattatagtctttatatgtagttccatcaagtctacctctataattgttcgtgatatccatttttgtatccaaatcaggagccttttcaccgggttttaaattttcgtgtgcataacctacttggtaagcccaattcctactgatatttttagtcattatggcattccataaagcgtgtctataagcgtccccattcccttgccatagcgtatacttagaatatcgttttgcagcttctcttgaagcgacatctgcaatgtttttagttttggcagcattatgagggtgttttgcaaaaagattaatttctttagcattagcacctaatttacctaatgaatattcaacataggagctttttatagatattgtatttatttttgatttttcttcacttaattcaagagcaacttgatcgtcagaattttttaaggctggggaaatgttttctttaattaatttttctaattctttttcgttgatctctctgttttcgaacatatcaaaatatgtcattatgttatttctaatactttcatagaaaaattttgtagatgcccttgattgtgcagttttgtttagtgaagaaattacttttttattatctaaagaatttacttctgcaactgcaatattttccttaataaataatgttgataaaaccaaagaaaaaaatattattaacaagctttttttgtacatttattcctaaactccttttttctataatatgttctatattatagaatatattaggtggaatagatagtttaatttctagtattatataaaaattcaggaatatttaatcttattatgtataaattgtcatttcaaaataatggatccggataaaatcggatccattattttatgaatatccatcttcatttactggaagttttttcttatgacattggtgatgaaccgtatggagattgatctgtcagtgtttgctggaatttctggtgtgcctgctggagtttttgctgttcagcggcttcaacagaataccagccatatcggaacatgacatcatataaatgtctttgtgttttctgagtttctagcgcaattcgctgaatatcttggtaaagagattcatgactgaattcattgagcgctgtgttgtaaccgcttgtcatatatttttcagtcgacaaaaggtctgtgacaaaatcacgatcattcatgtttgttgtcgtgggaaccggagtttgtggattcccgattttttgttggttttgttgttccatgttttttcctcctattgcataaagccagtagactggccttgccctgagctgcctaaatgctgaagaatttgtgtgtaatgctgatgatgcatttggcccacttgatttaattcttgtttcaacgtctggtcttggcagtgctcggccataaagtgagcctttttcatagcgatcaagttccaattcagcatatcctctaagtacaaggaatctttcactgaaatgacttgcgggggcatattcatttgctgattgttcaagatgtgttcctccttacgattttgtttccttactgattctttttatattgctgattttgactggtctttttaccgcctaggtctgcttcctgtgatggacctgcgtttccttttacacttgcagcacttacgcctgctttcgatgggtttttcttcaaacgagacatgtggacatcacctccattcttacaatgccctctcatctttaattcatacgccgcaaagtaaggcacatcagaatgtgtaaatttttgaaatccgctcttgaactgtttcggaaaatcttttaagataaagaaagaggcattgcttttttttggacaaaaaatgaatgactgttcattcaaaatgtttagggggatatttatgggcaaacatattcgcaaggcggctgtcattggttcaggtgtcatgggctcaggcattgctgcgcatctagccaatatcgggataccagtaacattgctagatattgtgccaaacgaactgacaaaggaagaaacggcgaaaaagagaacgcttgatcaccctagtgttcggaatagattaagtcaagaagcgatgaaaaaattgttaaagcaaaagccagcacctcttacatcagcaaaaaacctatcatacatcacaccgggaaatctcacagatcacctttccttattacatgatgctgactggatcattgaagtcgtcactgaaaaactcagcatcaaacaacacgtattctctctcatcgacgaacaccgcaaagaaggcagcatcgtatcaagtaacacatccggtatttcggttgaaaaaatggcagaaggccgatcagatgattttaaacgccactttttaggcacacacttttttaacccagcccgttatttaaagcttttagaaatcattcctattcaagaaacagatccagaagtactccaatttatgaaaaagtttggcgaggatgtacttggtaaaggcgtcgttgaagcgaaagatacgccgaactttattgccaatcgtattggtacttatggactccttgtgacagtgcgtgaaatgcttgaaaacaaatacaccattggagaggtggactcggtcacaggccccctcattggaagaccgaaaagtgcgaccttccgtacacttgatgtcgtagggctcgacacgttttcccatgtagctcgcaacgtatatgaccaagtagaaggaaaggaaaaaaatattttccagctgcctgagtttattgaaagaatgcttgaaaaaggatggattggcagcaaggcagggcaaggattttatcaaaaaaatggaaaggccattttagaacttgatcctgtgacgctcacatatggagaacgaacgaagcttaaagatccaggcattgagatggcgaagcagcaaaaagggacgaaagcgaaattgaaagcgcttatttatcaagatggccgtgcaggacaattgctttggaacatgacggcacctgtgctcctttattcagctcagttaaaaggcgaaattgcggatgatattcagtccgtcgataacgcaatgaaatggggatttggctggcagcacggtccatttgagctctgggatgcaatcggtgtgaaaaaagcagtcgagcgcatggaagcagaaggtcacagcatcccgcagtgggtgcaagacatgctgtcagaaggacacgacacattctatcaagagaatgctgatggagagcgtgcgttttatcacaatggggcttatgaacaggaaaaaggaaacgaaaagaatatttctttagcgaaattgaaaaagaagcagggcgtgatttttaaaaattctggtgcgagcttgattgatatcggtgatgatgtcgccttgctcgaatttcactccaaaagcaatgccattggactagatgtcattgacatgatcaatcgcgctgtcgatgaggtggaacagaattatagagggcttgtcatcggaaaccaagggaagaacttctgtgttggtgccaaccttgctctgattttaatggaagctcaggacgataatttctttgaaattgactttgtgatccgccgcttccagcaggcaatgatgaaggtgaaatatagcgaccgtccagtcgttgctgcaccgtttggtatgacactcggaggcggaacagaggtttgtctgccggcagcagctattcaggcgtctagcgaatcatacatgggtcttgtcgaggctggagttggactgattccgggcggtggtggaaacaaagaattataccttcgccatctgcaagggtcagctaagccgacgcagaccgctatacaagatgccacgctgaaaacatttgaaacgatagcaatggctaaagtatctacttcggctgaggaagcgcgggatatgaacatgctccgcgtgagtgaccgaatcagtatgaacggggaccacctgatctatgatgcgaaacaacttgttctctctcttgatgaagcgggttatcgtgcaccgctcaagcaaaaggtgcccgtcatgggagaaacaggctatgcagcaatgatattggcggctgaaaatatgagattgtctggatacatttcagagcatgacatgaccattgttaaaaaattagctcatgttatttccggcggaaaactgccatttggaacagaggtagaggagcaatacttattagagcttgaaagggaagcgtttttaagtcttgtaggagaagtgaaatcacaagcacgcatgcagcacatgctcgtcaaaggaaaacctttacgtaactaagggggagtcaaaatgagagaagcagtcattgtcgctggcgcgagaacaccagtagggaaggcgaaaaaaggatcgttaaaacatgttcggcctgatgatatgggggcattgtgtgtaaaagaaacattaaagcgtgccggtaattacgacggacagatagatgatttgatcatcgggtgtgcaacaccagaagcagagcaggggttaaatgtggctcggaatattggggcgttagcagggcttccgtatacagtacctgccatcaccatcaaccgctactgctcatctggtcttcagtcaatcgcttatgcgggtgaacgaatcatgctcggtcaggcagaaacgatcttagccggaggagtcgaatcgatgtcacaggtgccgatgatgggtcattccattcgtccgaatgctcaattggcagagcaagcgcctgaatactatatgagcatgggccatacggcagagcaagtggcgcaaaagtatcaggtcacacgtcaagatcaggacgcctttgcggtaagaagtcatcaaaaggcagccaaagcattacaggaaggtaaattttcagatgaaatcgtatccgttgatgtaacagagcggcgggtaggggagcaatatcaattagaagaacatcaattcacgttctcacaggatgaaggcgtgagagcgggcacaacggaggagattctttccaatttgcgtccggctttctcaacaaaaggcacggtgaccgcagggaactcttctcaaacaagtgacggtgctgcgtgtgtgatgatgatggaccgtgagaaagcatcctcactttcccttcagcctcttgccaagttccgggcgtttgctgttggcggcgtaccgcctgaggtgatgggaatcggtccgattgaagccattccgcgtgcgctgaaaatcgctggacttgagctgaaggatatcgggctgtttgaattaaacgaagcgtttgcctctcaggcaattcaagtcattcgtcatttagggatcgatgaagagaaagtgaatgtcaatggcggggcaatcgcgctagggcatccgctcggctgtacaggaacgaaactgacactgtcactcattcatgaaatgaaacggcgaaacgagcaatttggcatcgtcacaatgtgtatcggcgggggcatgggagcagcaggaatttttgaattgatctaaagggggaatcaggatgaaagcaatggaagaggtaaaaaagggtggaagcttcttaattgatgagacgaattatgagcatatctttacaccagaggatttctctgatgagcatcaaatgattggaaagacaacagaggattatattttacaagacgttgttccgtatatagatcaaattgaacatcatgaattcgagcattccgtcaggcttctcaaaaaggctggagagcttggacttctaggagctgatgtgcctgaagaattcggcggactcggattagataaaatcagttcagccatcattaccgagaaattctccagagcagggagtttctcactttcctatggcgcccatgtcggcattggatctctgccaatcgtgctgtttggaaatcaagcgcaaaaggaagcatacctgcctggactcgcttctggagaaacgattgcggcgtacgctctaactgagccaggatcaggctctgacgctcttggagcaaaaacgactgcagtcctgaatgatgctggaacccattatgtgcttaatggggaaaaacaatggattacaaactccgcatttgccgacgtctttgtcgtatatgcgaagattgatggtgaacacttctctgcttttatcgtagaaaaggattttccaggtgtcaaaactggacctgaagagaaaaagatgggcattaaagggtcctcgacgagaacgttaattcttgaagatgctcaagtgccgaaggagaatttactaggtgaagctggcagaggtcatgtcattgcctttaacattttgaatatcggacgctacaagctggctgtcgggacaattggtgcgtcaaaacgtgtcattcaattatcggcagaatatgcaaaccagcgtaagcagttccaaacaccaatttctcgattcagcttaattggtgaaaaagcagccaacatgtcggcaaagctctatgcgatggaaagtgctgtttaccgcacagtcggattatttgaacagcgcatgggtctattaagtgaggaagagcaaaaggacggcaaacaaattgcccagtccattgcagaatatgcgattgaatgctctctttgtaaagtgcttggctctgaaactttagattatattgcagatgaaggcgtgcagattcacggcggatatggattcatgcaagaatacgaggtcgaaagagcctatcgtgactcgcggattaaccgtatttttgaagggacaaacgaaatcaaccgtctgcttgtaccaggcacattcctgaagaaagcgatgaaaggggagcttccgctgcttcaaaaagcgcaaaccttacaggaagagctcatgatgatgatgccggaagagccgggtgatcagccgcttgatcaagaaaaatatttactcgcccatgcgaaaaagaccgcccttatggtatctggtatggcagcgatgaagtatggaaaagctttagacaaagagcaagaaatccttgtgaacatagcggatatcgtcaatgaaatttttgctgctgaatcggcgattctgcgtaccgaaaaggcaatcgcttcatcagggctagaaaagaacgctcaaaagcttgcctacacacaaattttcacgcaggaagccttcttaaaaattgaagcccatgcaaaagaatccttgatcgcgatggaagaaggagattcactccgcatgagtctgtcagctcttcgcaaactgacaagattcaccccgatcaatgtcatcgccaaaaagcgcgaagtggcgaaacgaatctttgaagcagagaaatatatcgtataaggacagcttaaaaggtgcggagtgatatccgcacctttttgtaagcatacatttaggtttttaaaatattttgtgataaaatgttctcacaatttgcaggaggtgaaaatggtggctttagatttttatgaatacccatcttgcggtacatgccgaaaagcaaaaaaatggctggaagaacacaataaagacatcaacagcatacatatcgtcgaagagacgcctgataaagaaacattaaaagccctttacgaaaaaagcggcttagagctgaagaagttctttaatacaagcggacagaaataccgggagctacagctgaaagatcaacttcctgcaatgtcagaggacgagcagctagaattactcgcgtctaacggaatgctgatcaagcgtccgattacaacagacggtaaacgagtcacagttggatttaatgaagatacatttaaaagcgtctggaaatgatgtaactttcattcagattgtggtatcttcaatatagattgaaagaaaagactggaggggtattgaatgagcacaccaaaagatttacgttattcagaagaacatgaatgggtcaaagtagaaggagataaggtgcgtatcggtattacgcattttgctcaatctgagctaggcgatatcgtgttcgttgagcttcctgaagtaggagacaaaattacagcggacgagcctttcggaagtgtagaatcagtgaaaacagtttctgagctttacgcaccgatcaacggcacaatcgtcgaagtgaacgatgagctggatgacagccctgaattcgtcaacgactctccatacgaaaaagcatggatgatcgtggtagagccagctgatacatctgaaattgagaacttgatgactgctgagcaatatgaagaaatgacaaaagaagactaattcacgtgaaattggacactctacctttatgggggggtgtccaatttgtcttttcaaaaagaacaggtggatataacagatcatgtcactggccgattcaaagaaagcggcatggtgctgtatcatcaaaatgaagagattggcacgatgattagtgaaaaccaatatgagttaaaatcaggttattcctatgatcaaaatcgtttttatcgtctgacggatacattgacccacgggacagaaaaatatgtagactgtgatgatgaaaatggctggtgctaatcacagataaggctgcagtgagcataagctgcagtctttttagtgcaagtgcccaatctttacaacctcgatgaaagattgtaatctaagggagaagtgaacaatgtcaaaagggccgggtgatcgtgttgaatgtagaggtagaaaaggtcatcattgtagaaggtaaaacagacaaacaaaagctaaaagaagtcataagtgaacctgttaccatcatttgcaccaatggcacgatcagtacatcgaagctggatcagcttgtagacgaattattagggaaagacgtttacatattagcagacagtgacgatgcaggcgacaaactgcggaagcaatttcgaaaagaattccctgaagcacttcatctttttgtcgacagaacataccgcgaagtggccgcttcaccgtcagcccacattgcatctatcctattagctgcaaacattgatgttcattcgaaatatttatgagggtggacgtattatgaaagagattgaagaacacgaattcaaggaaatagaggacgatttatttcttttatacttatatacaccgttttgcgggacatgtcagctggcaaagaaaatgctgacagtcgtagacaccatgcagccggatgtaccattttatgaaaacaatttaaactactcaccaggctttgcaaaagcttttgagatcgaaagcgttccttgctttctactgtttaaaaaaggtgagctggtgcaaaaaggctatgcctttcactccgttccatatcttcatgaaatgattgaaaccgctaaataaagcggttttttgtcatatttcaagcaattcgtctgaaaatttgtcgagttatttataaaggacaagccaatgtttgtagagaaatgttatgtataaccaaatgacagggaggttatacatgtggaaaatgtgaaaacccatgggaacacagggcagcgtttattattaaaaccgctgctctcatcatcatccttgaagattacatttgaggcggaaactgactcttgtacattgattgtggatgaacgtggtgaagtgaagaaactacctgcaattgagttatcggatctcatcttttatggtgagagaaaagaaatacttcaattattagatggagatatgtccttacagcagttaattagcagaggacaagtgaaggtaaaaggatcattccgtgcgctcctaagactagaggctgtgctttggctgacgaacggtttttttcgaaaaatgataacgtagtcgtttacttggaaattagcgatttacagcgttgacatatctcgggtagcatgatattctacgttagtaaaaacatgaacatcacataaaacaacatattttctcttattaagagaggtggagggacgtgccctatgaaacccggcaaccgtcagcatagctgaaattggtgccaattcactcaaagccgcaatgctttgaaagatgagagaaaggcgtattgaacataaaaggcctttctgcttgcgttgcagttaggtcttttttactgacctggtgtcaggctagaggcatgacagcaggaagaataaataacgtatgtgatggcaacctatagattcagcaagaaagcaggtgaacagactgtgatccatttacagaatgtatcaaaaacgtaccactctaaaagcggaaatgttgatgccgtgaaagacgttaacttggatatcgataaaggtgaaatattcggaattatcgggtatagcggtgccggaaaaagctcgcttattcgcctattaaacggtctggagctgccaacagaaggaattgttgaagtggcaggcaaccggatcaatgaagtatcgaatgcgaaacttcggaaagcaagacaagaaatcagcatgattttccagcactttaacctactttggtcaagaacagtgagacaaaatattatgttcccgcttgagatcgcaggtgtacctacatcgaaacggagagagcgtgcgaatgaactgattaaattagtcggtttagaaggaaaagaaaatgcgtatccgtctcagcttagcggcggacaaaagcagcgtgtggggattgcgagagcattagcaaatgatccaaaggttcttctttgtgacgaagcaacatcagcgcttgatccgcaaacaacggattctatccttgatcttttagcggatatcaataaacgtttagggctgacaattgtgctcatcacacacgaaatgcacgtcattcgcaaaatttgtcatcgcgtcgcggtcatggaaaatggacgcattgtcgaagaaggcgaagtattacgcgtcttcagacagccgaaggaagagatgacgaagcgatttgtacagcagcttgctgaaccagaggaagcgaaagaaacaatcgaacacgtcttagagcgagtaaaagaaggtcaggtcgtacggttgtcctttattggcgattctgccgagcaaccgctcatcactgaaatcattcgatccttcaaggtcgatgtaaacatccttcaaggaaagatttctcaaacgcaggaaggcgcgtttggaacactctttatccatattaatggagaagagaccgaggttgaaaaagccatcgcctatatccaaagtaaacaggttgaaattgaggtgatgacacatgtttgagaaatggtttccgaacgttgacctagatgtgatttggaatgcaacgggtgaaacggtgtacatgacactcatttcattggcatttgcttttgcaatcgggattatcctaggactcctgctcttccttacaggaaaaggcggtctttgggaaaataaaccgatcaatgctgtcatcggtgcagtcgtcaacattttcagatcgattccttttatcatcttaattattcttttattagggttcacgaaattcttaatgcatacaattctaggtccaaatgcagcactccctgcccttgtcattgggtcagctccattctatgcacgtcttgtcgaaattgcactgcgtgaggtagacaaaggagtcattgaagcagcacggtcaatgggagcgaaaacgtcgaccatcattttcaaagtattgctgccagaatcattgccagccctcatttcaggtattaccgtaacagcgattgctttaattggctcaactgcgattgcaggtgcaattggagcaggcggacttggtgaccttgcttatgtggaaggataccaatctggtaatacagatgtcacacttgtagctactgtgtttattctcatcatcgtctttattattcaaataatcggtgatttgattacaaataaaattgataaacgttaagggaggatttattcatgaagaaattgattttaagtgcactatttctagcatttgcaggcatcttagctgcatgcggttcatctaataacgcaagtgatagcaaaaccattacggttgccgcttcaaaaacaccacatgccgaaattcttgaagaagcaaaaccacttctaaaagaaaaaggctacgatctaaaagtgaaagtacttagtgattataaaatgtacaacaaagcgttagctgaaaaagaagtggatgcaaactttttccaacatatcccttacttaaatgaagaaaataaatcaaacaaagattacaacctagttagtgctggtgcggttcaccttgagcctttcggtatctactctaagaaatacaaatcagtaaaagatattccaaacggcggaacgatcatcatgacaaacaacgtagctgaacaaggccgtatgcttgcactattgcaaaatgctggtgtcattaagattgatcctaaagttgatacaatcaacgcaacagtaaagaacatcaaagaaaacccgaagaacctaaagttcaaaaaaatcgctcctgaactaacagcgaaagcttatgaaaacagtgaaggcgatgctgtgtttattaacgtcaactatgcgattcaaaataaattgaatccgaaaaaagattcaattgaacttgagcaaacaaagaacaacccatatgcaaacatcgtggcggttcgcaaaggtgaagaaaaatcagataagatcaagacattaatggaagttcttcactctgataaaatcaaagaattcatcgacaaaaaatatgacggtgctgtactaccggtatctgaataacaatgtgttaacctcgctttcatcaaagcgaggtttttttgtgtattttttcaaatctcgctcataataaaaatgtacaaatgacctgaagggatggaatgaagatgaatgaacagcatatgagcggatccatgcagcaatcactgactgattataaaacggcaatgggtgaatttcagaagaaaatgccggtgtttgggaagaaattcaatgaattcacggagcagtgctttcagagcgattcattaacgcaaaaggaaaaacaaatgattgcccttggcatcagtattcatgcacaggatgaatactgcatgatttatcatgcaaagggagcgctcgaccaaggcgcgacagaagagaatttgctagaggtcgtcagtgtggcggcagcgttcggcggcggtgctgcactaagtcaaggcatcacagttgttcagcaatgtattgacgaatttggaggacagacgcattaagggaaggataagatggcatttatccatatcagggagttgagtccttctcagccgattgtgtgagaaaatatgccagcatagcgcgtcatatcccttttgagtgaagccacatgtctttgatacaatgaagctacactcaaagaagggaatggtttattatttgttcggaccatagtacactgggattggattataccgccgagatggaaaaggccatgcataaggctcatggcatgagctatgcagagtacgaaagagaccatgacttacggatgaaagtggaatataaacgagagcagtcctatcgagatgagaaaagacagctcgcaaaaatgaatatacgaggctattaaatagctaaggggcggggagaacagattcccgtcctttctttatgaaaacagtcttttcgacataaatccttttatctaccggctttttttgttagaattttgagagcatcctctcacgcatatcgtgaatgtgttgtattcagttttaatttgttataaaattagaatgagaataaattgagaataatgattattttggaggtatcgatatatgactgcttcgacattaacaattaaggacttgcacgttgagattgaagggaaagaaatcttaaagggtgtaaacctcgagataaaaggtggagaattccacgcagtaatgggaccaaacggtacaggtaaatcaactttatctgctgccattatgggtcaccctaaatatgaagtaacaaaaggtagcattttgcttgatggcgaagatgtacttgaaatggaagtagatgagcgcgctcaagcaggtcttttccttgcgatgcaatacccatctgaaattagtggtgtgacaaatgcggacttccttcgttctgctattaacgctcgcagagaagaaggcgatgaaatctctctaatgaaattcatccgcaaaatggacgaaaacatggagttccttgaaatggacccagacatggcgcaacgctacctaaacgaaggtttctcaggcggagagaaaaaacgcaatgaaattcttcaattaatgatgattgaacctaaaattgcgatccttgatgaaatcgattctggtcttgatatcgatgcgttgaaagtggtttctaaaggaattaacagaatgcgcggcgaaagcttcggttgcttaatgatcactcactatcagcgtctactgaactacatcacaccagatcacgttcatgtcatgatgcaaggacgtatcgtgaaatctggcggaccagagcttgcacaacgtctagaagcagaaggctatgactggattaaaaaagagttaggaattgaagacgaaactgttggtcaagaagcgtaagcgttaggaggattattgatgacattagaaacgaaattatcagtagatcaagattatgtcaaaagcttctccgagaagcatcaggaaccggcatggatgagttcccttcgcttacaggctcttgaaaaagcagaagaccttccaatgccaaagcctgacaaaacgaatatttctaaatggaatttaaccaatttcaaacagcacacagtcgaaagtgcgccatttggatcattagaagagcttcctgaagaagtgaaatctctcattgatttagaggacacggataagacagtctacattcagcgtgatcaaacgccagcatacttgtctctttcaacagaagcgaaagacaaaggcgtgatcttcactgatcttcatacagcgcttcgcgaacatggtgatctagtgaagaaatacttcatgacggatgcagtgaaagtagatgagcataaactaacagcattacatgctgctttagtcaatggcggagctttcctctatgtaccaaaaaatgtagaacttgaagcgccaattcaagccatctacctgcatgaaaatgacgacacgactttgttcaatcatgtcatcgtcgtagcagacgatcatagtgcagtgacatatgtagaaaactacattagtacagcaaaacctgaagaagcaatcttcaatatcgtgtccgaagtgttcacgggagctaatgcccgcgtcacttacggtgcagtagataaccttgcagaaggtgtcacagtctatgtgaacagacgcggtatggcaaatggccgtgacagtaaaatcgaatgggcgcttggcctgatgaatgatggagacgtcgtgtctgaaaacatcacaaagctcatgggcgacggtacattcggtgatacaaaatcagttgttgtcggccggggcaatcaaacagaaaactttacaacaagcatcatccacttcggtaaaaactctgaagggtatatcttgaagcatggtgtgatgaaggatcaagcatcctctatctttaacggaattggtaaaatcgagcatggcgcaacgaagtcaaatgcagagcaggaatcacgagttctcatgctgagtgagaaagcacgcggtgacgcaaacccaattctattaattgatgaagatgatgtcacagcagggcatgctgcttctgttggacgtgtcgatccaattcaattgtattacctcatgagccgcgggatatccaaagaagatgcagaaagacttgtgatttatggcttcttaaatccagtcgtcaaagaactgccgattgaaggagttaaaaagcagctcgtttctgtgattgaaaggaaagtaaaataatgaatatcaaagacgttcgtgagcagtttccaatccttcatcagcaagtgaacggacatgatttggtgtatttggacagtgcagcgacttctcaaaaaccaagagtggtcattgatgcaatgaatgagtattaccggtcttacaactcgaacgtccacaggggtgttcatacccttggcacaaaagcaacggacgcatacgagggtgcgagagagaaagttcgtgcattcatccgtgcttcatctgtccaggagattatttttactagaggcacaacaactgcactaaacacagtggcgatcagctatgcaagagcaaacctcaaagaaggcgatgagattgtcattacgcacatggagcatcatgcgaatatcatcccttggcagcaagcagcaaaagcaactggcgccacattgaaatacattccgttacaggaagacggcacgctatcgcttgaagatgtgaagcaaacggtcacacatcaaacgaaaatcgtcgctgtcacacatgtctcaaacgtattaggaaccatcaacccgattaaagagatcgctaaaattgcccatgatcatggggcaatcattgtcgtcgatggtgcgcaaagcacgccgcacatgcaaattgatgttcaggatctagattgtgactttttcgcattctctgggcataaaatgtgtggaccgactggcatcggtgtactttacgggaagaaggaccttttgaataatatggagcctgctgagtttggcggtgaaatgatcgactttgtggatctgtatgattctacttggaaagagctgccgtggaaatttgaagcgggaacaccgattattgccggagcagttggactaggaaaagcgattgatttcttaaatgacattggtatggaagaagtcagccgttacgagcatcagcttgccacttatgcgcttgagcgctttaaggagcttgacggtgcgacagtttatggaccgcagcaccgagctggacttgtgacgtttaacttagacgacgtccatccacatgatgcgtcaactgttctggatacggaaggtgtcgccattcgtgctggacaccactgtgcacagccgctcatgaaatggcttggtgtatcagcaactgcaagagcaagcttctatctgtacaatacagaagaagagattgacgagctcatcgcagcgctccgtaagacaaaggagtattttacgaatgtcttttaatgtaaacttagacacactgtacagacaagtgattatggatcattataaaaatccgagaaacaaaggtgtgttaaacgacagcattgtcgtcgatatgaacaacccaacgtgtggtgaccgcattcgtctcacgatgaaaatcgaagacgaaaaagtcattgatgcgaaatttgaaggagaaggatgctctatttcgatggcatctgcctctatgatgacgcaggcgattaaagggaaagatattgaaacagctttgaaaatgtctcagattttctccgatatgatgctaggaaaagaatacgacgattccattgatcttggtgacattgaggcgctgcagggagtggcaaaattcccagcccgcatcaaatgtgcaacattatcctggaaggcgcttgaaaaaggcgcatctgccgaagataacggcaaatcataagattggagtgaaaatggatggctaaaaaaatgccagatgttggtgaatataaatacggcttttctgataaagacgtttccattttccgttcagagcgcggactgacaaaagagatcgttgaagaaatttctcgtatgaaagaagagcctcagtggatgctcgacttccgtttgaaatctcttgagcacttttacaacatgccgatgccacaatggggcggagatttaaatgcattaaactttgatgaaattacgtactacgtaaagccatctgagcgctctgagcgttcttgggatgaagtaccagaagaaatcaaacaaacctttgataagcttggtatcccagaagcagagcaaaagtatttagcaggtgtatctgctcagtatgaatctgaagttgtgtatcacaatatgaagcaggaccttgaagatctaggcattgtgtttaaagatacagacagcgcattaaaagagaacgaagacatcttccgtgagcactgggcaaaagtcattcctccgactgacaacaaatttgctgcgcttaactcggctgtatggtctggtggttcatttatctacgtaccaaagggcgtcaaagtagatacaccacttcaagcatacttccgtatcaactctgagaacatgggtcagttcgagcgtacactgatcattgttgatgaaggcgcacatgtgcattacgtagaaggctgtacagcaccagtttacacaacaaattcacttcatagtgcggttgttgaaatcgtcgtgaaaaaaggcggctactgccgttatacaacgattcaaaactgggcaaacaacgtcttcaaccttgtgacgaaacgtacagtatgtgaagaaaatgcaactatggaatggattgatggaaacatcggttctaagctgacaatgaaatatccagcagtcatcctaaaaggtgaaggcgctcgtggtatgacattaagtattgccctagcaggtaaaggtcagcaccaagatgcaggtgcgaaaatgattcaccttgcaccaaacacatcttccacgatcgtatcgaaatcgatttccaaacaaggcggtaaagtcacataccgcggaatcgttcacttcggacgcaaagcagagggtgcacgctcaaacatcgagtgtgacacactcatcatggataacaaatcaacatctgatacaatcccttacaatgaaatcttaaacgacaacatttcattagagcacgaagcgaaggtatcaaaagtatcagaagaacagctattctacttgatgagccgcggaatttctgaagaagaagcaacagaaatgatcgtcatgggcttcatcgagccattcacaaaagaactgccaatggaatacgccgttgaaatgaaccgcttgattaagtttgaaatggaaggttctatcggttaataaaaaaaggaccaaaaacgtgatatcaaacgtttttggtctttttgtttttgaaaaaatacaacttacatcccgctaggtgagtaaaactcatcaaaggctttagacaaatcgtcagctgcagatgtcaagatcgtttcttcttctaaaatcgctgttccttgtgcccggacaatatgaaattgatgaaaccccatcaagttttgaaatatttcttttaggtaatgatgtgaaaattccagaggtgtatatcgatcgttatttgtgaaaattgagccgcttgcttgaagcaaaagtacacgataatcgtcagtcatcagaccaactgaaccagcttctgtatatttgaacgtttctctagcaatcaagatattatctatataatctttcatacgtgaagtcacattgaaattatgaacaggtgacacaatcacaattcgatgatgtgctttgaattgagccaataaagcagaagaagcagcagcaattttttcttccgtagctgttaatgtttgttcagatgcttgcttatcccaaatacgtagcagctgttctttttcgatacgaggaatttcagttccatataaatgtaaaatcgttggttcctcatgaggaaacctttctttaaactgttctaaaaatagtgtttgcagtttgtttgaataactttctcgatgagtgaaatcagggtgcgcgttaatgattaatgtttgcatatacatgctccttttcttttgataaactgagtataaaatataaaggtgacaaaacatgtcacctttttcaaaaggaaagtcaaaatgaaaaaatcagaacgattaaaccaagagcttatttttttaagtgataaatactcatttcagctaaaggatttagaaactgaatttggcatatctaaacgcacggctttgagagatatggaagagctagagtcgatgggcttagctttttatgttgaaaatggaagacatgggggatatcgactggtgaatcaatctccattggttcctatttatttcaatatcgatgaagttcaagctatttttttcgcgcttaaagctttagacttggtgtcagcaacaccatttaaaaaatcctactcacaaattcggcaaaagctgtttgccacaatgtctgatgagagaaaacaaatgatcacggagactttggatgtgattcattactataatgtcgcaccagtcagtgaacaaaatcaattggaattgattttacaggcgatgatggaagatcaaatcgtgaagatgacttatactcaaaatgaaaataaaaggatcaggctgcaatttcttgagttgttttatcgaaatgggatttggttcacgaaagcatatgatgttcgaaataaaaagtggggcatctatagatgtgactttatgaaggacgtgatgattgaagaaggaatcagagacacctttacgaaggaagaattaaaagaactgcagctcgagtacgaaaaaacttatcatgatatctcatttaaatgtcgattaacggaacaaggaaaagaaaagtttttgaagaatcattatccgaatatgagattggagatcgttgatgatactccttatattatgggtgggtacaaccaagaagaattatcgtatatgacccactatttgatctcatttgggaaacatgtgaaaattgaataccctgatgaattaaaagaaagttatctgaatcaattgcaagaaatggtcgaccagtattgaaccataaaagacttcagaaaaggcgaaccactacagttcgcctttttcttatctgtttttatcacggtgagttacttcgccgcagtgaatgtattggttttcggtttatcatgtacctttccatacgtcagctgacgccaaataaattccatcggtccgtacttaaaccgttttaaccataacgcactgaaaagcacaaggaagacatacacgccaatagctatgaaaaacgtaccagccggctgaagatgatcgacaagccccgctccatactttagaaatagcatggttccaatgatcgagtgaagcaaataacaggttagggacatccgtccgactttggtaaagaccattaaagcacctcgcagctgaggaacgtgtagaaatagcatcgcaagtgtactcatataaaacatactgccagttaatcccccgttttgttccagggcagtggcaatgttcacccagagtgtatgttcaaaaggattgaccgccgtaatgatcgtactgccttgggtgatgagaaaagcgattgtacaaatgatccaaatgcgattccaaattgcttttttcgcctccatgtttttgaaaaactccattttcacaaaatacacaccaagtaaaaacatgaagaacatagaatagacagtgaaaaatgaactggaagccatcgtcaccatatcagcccacctgtctccgatggatgctaaataattcagactgttgtggctgttcagctcgaaatcagcaaaatcgggcttgcctgatgatcctgtactgatggaattgagcagcatcgtgaaaaaaggcgtgagcaattgaatcacaaagagtgtgatcagccagtataggatggttttagctgttcgtttgtaaaagaaaagtaacaaaaagccagcggcagcataataggtcaaaatatcaccaatccaaacaaaggtgacatgcagaaggccaattcctaagagaatggttaacctgcgtgcaaacagcttgtttgggctgtccaccttctgagcagctcgatccataaaaatcataaaaccaactccgaataggaaagaaaacaacgtaatgaatttccctgaggcgaaccaattcaccaagttgtgaaaaacatcatttgcttccatatcgaaccccttcgccgaatccacgatcaaaaagtaattgaccagaataatccccattaaggcaaatccccgtacaatgtctaagaaatgaacccgatcccgcagactcatcggttgtccgtgtgctactttgtttgcattcatatccatgctccttttcttgttatgataaatgtcattcggatcaacacatcgatccttacaatgaatcaatatacgacccaattcttaacaatttatgaagatccaattttttgaaaatgaatgtgacaaattgatggcagatggtcatattcataaactgttaagatttatgctgtatcttttcacatagctagatgatatatagtaaagacataaaagaaagtacatcacgtatcatgaggtgagagagatatgaaccatcgaatattagtcgtagaagatgatcaggatattggagaccttttgcaggaatcccttacacgcgcaggatatgaggtgctaagagcgatgaatggcgagcaagcattgaagcttgtgaacgattcgcttgatttggtgattttggatgtgatgatgccaggtatttcaggcatcgaaacgtgccagcagatgagagcgtcttctaacgtcccgattctatttctgacagccaaatcaagtacattcgataaaaccgaaggcttacttgccggcggggatgattatatgacaaagcctttttcagaagaggagcttcatgctagagtgattgcacaattacgcaggtacaccgtctatcaggaaaagaaggaacaggaagagacctttcttgttgggggcaagctgagggtgagcgaagaatttaatgaagtgtggaaagaaagtcagcaaatcaagctgtctgatttagaatatcgaatgttgaagctgctcatgagcaggcgaaacaaaatcttttcagcccaaaatatttatgagagcgtgtggggacagccttatttctattgttccaacaatacggtgatggtgcatattcgaaagctgcgtgccaaaattgaagatgatccagctcgccctgtatatattaaaacggaatggggaagaggataccgatttggcacatcgtaaatatacactagccaaaaagctggcactgctgattttgacagctgcggtcgtgagcggacttgtttttttgacgctgcaaaagatcaccaatgatctgattgatggatacttgagttcggacgagtattacgaggaggagtcagccaggtatattcaaaaattcagccgctatgtgtctgagaatgagctgtcttcaacagatcgaaaagcgtttggtgagtgggtgaaaaaagaggattacattaatttgaccatcttcaaggatgaagtgctgcaatatgactccatctattccgctgctgatgaatcggcgtacggaaaagaaaaggtgacccagtacgctgagcatcattcgtatccggttcagtttagcgacggtgaaggccgcgtcatggtggatggtttctattcatctcgttaccacgatcttgcctttacacttgagctgctcggagcgacgcttatttttctcagcattgttcttcttggcatccgcaaaagtttatgctatctgcaaacgattcaccaagagattcatattcttgaaggcggtgagctggactatgagatgacggtgaaaggtcatgacgaattagcgatgattgccaaaagtattgaggatcttcgtaaagcttttctggacaagcttcaagccatcgacgagctacaagaagagagccgcagcttggttactgaaatgtcacacgatatgagaacaccgctgacgtcgctgatgatgaatttagagtttgcgaaaaaagaggaggctggagcggatacccgtaaagatcaatatatagcaagtgcttatgaaaaagcactgcaattgaaaaatctgtctgataatctgtttgcctattgtctacttgataaagaacatgaacctgagcttgagaccgttgcagtcaaagaggtcatttacgatctcttatcagatcaggtggcgatcttgcatcaagagaaattcaaagtacacctgttaggagagctgcccgacagctatatcaacgtgaatgtcgaggagcttggccgagtgtttgataatttgatgtccaacttacttaaatacgccgatcccaaaaaagacatcaatctcacgtttttatccgatcaagaaatctttgagattcacgtcagcaatgcgataaaagagacagatgacacgcaggaaagcactggacttggtgaacgaagcataaaacgaatgatgtcccgcatgcacgggcagtttgaaaggatggaaaagaacgatatttactacatcgtgctgcgattctggcacatcaaaatatagaccacaaatgaataatatggaatggagagactacccaatgaaacgattcaacaacttccaaaaggtacccgatctcttgcaaggccttctgaatatctgtctgttctttctagccattgctttaagcgtcctcttaattagtgaaacttggtatattgtccaattcgtctacaagactttgtttaacaaaggagaaagctattatgggatgcttggagaactgctgatcttctttatgtattttgagtttatagccttaattattaaatactttaaatcaaactttcattttccgcttcgctattttatttatattggtatcacagctgtcatccgattgattatcatcgatcatgaagaggctgtatcgacgttctggtgggcgctggccattcttgcgatgacttgtgcactctttatcgccaataaacgacataccgcgcaggagcatgaagaagtgaagtgagggaagaagacgaacgatgaccgttcgtctttttttcatgtattggtattgaggaggtgaacattccatctttaaagtagtacattaagatgttgtagtgatgagtgatcgcaagaagaaacagggatattcaaaagtggtttacctgatggacggattcttatggtatgctttagaagccttttctttccattcatattcatcattctatgaacatggttcgatcaggttgtttttttacgaaatattctagttgaacaactgctcgttctgacgagaattgtgcccatttccaaagcaccgaaccgtcagtatatgagtacgattcttattttcactgaaagtaaattattcttatttcgaaatatcactcattaggatataggaatgaagatgactagtgcggctggccattctcgtttctgtttgaaggagcggagaaattgacagacatcaagaacgaaccattctcattgacaagtatgcagcaggcagcccctgtccatattccagaaagacaattcatttcatcacacgacggcacaagccttgcgtattatccatttttatcagaagagaagacgcaggccaatgtgatcttgattcatggcggtggtgctcatagtttggctggttacgagcatatcgcctatacgcttcagcataattttcaagtgaatacgtttttaatcgatttaagaggtcacggccattctgatggaaaaaagggtgatacacctagtatcacagatgtgtggcaagatatttcgcagtttgtggatgcggtcaaacagcagcataagggagctgtttatctttgcgggcattcatctggagcaggattactgctaaactacatatcttggccgaaaaaaagagaagttgatggctacttttttattgcacctgaatttggctatcaatcagacactgcaagacctgatcaaattccttttgcgaccgttcaagtatggaaattcgttttgtctgccatgacaaaagggttgctgatgagtcattctgaagccgtgcgttttcattatccagcatgggcagtcgagcaggatccgcttctattgacagccatcaccgtcaatctatcacttgctttaaccccgtctgcacctaaaaaacaatttgcgatgatggatcggccctatgcgatgttagtaggcagcgaggatgagctgtatgatatagaaaaatttcctgcctatcatgagctaccacatgaagagatcaaacaacaatcagtctatgaagtgctggatggacatacccatttgtcggtgttactagaagcaggaaaacatattggaaagaccatccaaatgtggaatcgttctatttagtatgaacaactagtcaacactctccctttttcttaaaaatttacattgacaccatccttttctatgataaaatcatagtgtgataatgagaatcgttatcaaacgatatgactacatatagaatggataggtgaggtacatgttcaaaaaatctttttggtcgctaatagttgtgctctccatcgttttacttgcagcttgcggcagcaataacagtgaaggcaagtcagctagtaaagaaaaaacaagaaccgttgaaagcgctatcggttcaactgaaataaaaggatcgcctaaacgtgtggtgacgctgtaccaaggagcaacagatgcagcagtcgctatgggcattaaaccagtgggtgttgttgaatcatggcttgaagcacctacgtataaatatttaagagatgacttaaaagatgtcaaaattgttgggcaggaaactcagccaaacttagaggaaattgaaaagcttaacccagatttaatcattgcatcaaaaatccgccacgagcaaatttttgatcagctgaaagaaatcgctccaactgtagcaacagaaacagtattcacttttaaagatacagtgaaattaatgggtgaagcgttaaatcagcaagacaaatcaaaagaattgctaacgaagtgggatgatcgtgtcgctgatttcaaagaaaaagcgaaaaaagacatcaaaaactggccaatgagtgtgtctgtggtgaacttccgggcagatcatgctagaatctatcaaactggattcgcagggtccattttaacagagctaggctttgaaggacctaagaatgtcaaagataaaaagcaagacatcattacactgacagacaaagagagcattccgcaaatggatgcagatgtgatctattacttcatggatgatcaggataaagcggttgaaaaagcatataaagagtggacgagtcatcctttatggaagcagcttgacgcagtgaaagcgaaacaagtgcataaagtcgatgaaatcacttggaacatggcaggcggtatcactgctgcaaacatgatgcttgatgatatttatgatcgtctcggaattgataaataaggatagcagaggagaaaatgtgaaaaaccattttctcctttttccataacagattgaaagcgggaatcagatgagaagtttattaaaaaaggattcgagcaaggcgctgctttttgctggattcgttgtattgatgttggtcttttttatgctgagcatatctcttgggcaaacctcgatttccctcaaagccaccatccatgcgtttcttcattttgatgaatcggatccaaacagtgtcattgtcatgacatccagattatcaagagctttaattgcagcggttgttggatcaagtctagccatttcaggtgcactgatgcaggcattaacgagaaatccgcttgcggcgccagatttgttaggcattaatgcaggtggactattttttatcgtcatttcgattgttttcttttcaacagagtcattaacaggctatatgtggacagcctttttaggtgctgcgattgcagggatgctcgtttttctcttgggctccattggaagagatggattgacaccggtcaaaattgtccttgcaggtgcggcgatatctgcactgtttgcgtcctttacacaaggtcttttaatcgtgaatgaacagtcgattcaaagcatcctgttctggatggcgggttcagtgtctggaagaagcattgatatgctgctgcctgttttgccttatattttaggtgcaacagttgtggcgctgcttcttggacgctccatcaatgtccttttgtcaggagatgatattgcaaagggacttggccagcgtacgctggtgctgaaaatcacgatgggagttctcgtcgtctttttagcgggtggttccgttgctgtcgcaggatcgattgggtttgttggttttctagtgccgcatattgtgaaaaagcttgtcggacctgaccaccgctgggtacttccgtattgtgcagtagtgggggcgtctcttttacttgtcgcagaccttgcggctcgttttctgatcatgccgcaggaagtaccgattggtgtcatgacggcggtagcaggagcgcctctatttgtttatctcgtgcgcaaggggttgaagacaggtggctaaaacatatacagtgcgttcaaagggcgggcgcatttcatttcaattttcaaagcggacgtttttgattttacttttattgacggccgttgcttttggattatttattctcagtctctgtatgggcagccggtttattcagccgatggatgtgctgcttcatttaatcggtcagggagagggaaacacctttgtgctcaatacactgagaattccaagaacattgctggctgtcttagtgggggccgcgcttgcggtatcaggacttattttgcaagggttaatccgcaatccgcttgcatcgcctgacatcattgggattacgagtggtgcttcgttcggtgcgattatgtttattgtcttttggatgggcactgtgcctattgcgtatcaatccttatgggcgattgcaggggcttttgctgtttcgtgtctgatttatttgctttcatggaaaaaaggggtgaagccgatcacacttgtcctaatgggcatcgggatttctgccattatgaaggcgtgtgtgacgtttactcttgttcttagtgatacgatgacgacgacaaagtcatatatttggctgacgggcagtttatatggttctacgatgaaggacgtcatgtcgatgcttccttgggtcatgatcattttaccaattgtcatggtgttagcaagaacgatgaatgtgaaggagcttggagatgatctcgcaacaggtctcggggtaaaagtgcaggcaaaacggttattctttctgctgatgagtgtgacattggcggggattgctgttgcctttgcaggcggcattgaatttgttggactgatggcgccgcatgtcgcacggatgatcatcggccgctccttcattgcgctggtgccggcatctgcgcttgttgggagtattctcgtgatgctggcagatttagtagctagaacggcttttctaccgttagatgtaccagcaggtgtattcacggctgcaattggtgcaccgttctttatttatttgttataccagcagcgaaatcgataaacgaaagatggaggttttgatatgaggccagagtgggttgagagagaattacttgatttcggggtacacatcacaaatggaccaatgacatctgaccgcacacttgctgcgcttttttcagaagcatctgtcctgcgtttattagaggctgaaaaggaagccatgcatgcaccgaatgtggcggtagcagcgtcgatgttttcaaagcgttatgcctacttagccgtcagttcctctttgtacatgatgacgctgtatgacggtgtctatcagttttcaccggaggcatgtgcctttagagaggatcggaaaattgaaattgatgagtctttgtgttcgtttgttccactagaaggagatcggcatgaatggagagagcaggctgtgcatgcgctgtttacggagtgtgttacccctcttttagacgtgctgaagcgcacttcaagacttccgtataccattttgtgggagaatatagcggttcgtatcaattctctttatcgcagcatgatgcgggaagccgaagagcctgcggtgaagcagcgcgtgcgggagggttatctgtatctgaagcaagcggctggtgatgtattcggagcaaaacaaaatccatttcatcacagcttaaacttagatgacagtttactagaaacatccgaccgaaagacctgctgtatgtattataagctcgagaaaaaatcggagagtctcgattattgtcttgtctgtccgcttgaaaaaaagaaaggcactgcttgctcatagcagtgcccttcttttttattcccaaatcgcgcctgcccattctgggtgatcgataaagggattgcggttgttctgatacgtttcataaatgatctcgttgcggttccgttcgatttgatcgactggatcttgtttgtgccacttgagaagtacggacattttgccatggagaggggcgcttccattattcactttgtcgtttaattctaaatctggaaagcggtcatcgccctcgtaccgcactgccatataaaagagcattcttgccacatcccctttcacccggctatgaggttcgaatgagtcgctgtcgtagaaattacccggtgcccccttgtattcatttccgcccagatcaaaatctaaatttccacgtgtgctattcgtttgcacgtctgttgcccgcagatgatggagatctgtaccggggccctggcttgtcccaaaattgccgtgtgacttagcccagacatgctcccggttccactggccaacatttccgccattcgcttgctttgagcgagagacaccgctatagagcaagagcacattgcttggattctttggatcttcatctgttttctttaaggcatcccaaacttggctgtaggatagctgcttatgatcatcaataatatcgtgtaaagctttctttagagcgggtcctgatttgccattagcagattgataataggaatcgatttgacttgtagcggctgttttcgcttgttgtgcagatgtttcgttttgaagctgtaacggggaaaatgtgatggtttggctcggtttattcagagtaaagctttgagctttcgcagctggaggcagcggggcggctaacgtgccgaatatcatgattccggcagccacagttccaaataaggttctcttcattcgatttcctccttaatagggaatgtattctctttatttctatcatattgtcagaaagaaataaatggatttatcgtaaatgttatgtaatgaattcgtaggaaatgagattgctattttaacagcattgctgtataagtgggcatataggacgacagcgagggagaggatggataacgtgaaagaactgcaaataccttcaagaacgattatgacaccaggacctgttgaagtagacccgagagtgctccgtgtgatgagtaccccaattctcggtcaatttgatccagcatttacacatatcatgaatgaaacgatgaccttattgcggtcgcttttccaaacagaaaatgaatgggcttttccgattgacggcacgtctcgttcagggcttgaagctgtgcttgccagtgtcattgagccgggtgattcaatgcttgtgcctgtctttggccgcttcggtcatctgctcattgaaataggacagcgctatggtgctgaggtacatacaatggaatgtggatggggaacggtttttgatcctagcgatatcattcaggaaatgaagcaggtcaagcctagaatcgttgcgatggtccatggtgaaacatccacggggcggttgcagccgcttgagcaaattggtgaagcgtgccgagaactcgatgcactgttcattgtagacgctgtagcaaccattggcggggcccaggtgaaagtggacgaatggaagattgatgcggcgattggcggtacgcagaagtgcttgtctgttccatcaggcatgtcacctatcacgtataatgaccgggtggcagctgtcgttgaatcgagaaagaaagtggaaaagggaattgcgacacaggatgaattgcaggagcaaatggatatttctccaattaaaagcaattactttgatctcagccagctccaggattattggagccctagacgattaaatcatcatacagaagcgacaacgatgctctatgcacttcgtgaaggggttcgtgttgtgctggaagaaggactgtctgagcgttttcaaaggcacgcatatcacgagaaagccttgatgaaaggtcttgaagcgatgggacttgaattgttcggtgatccacattgtaaaatgccagttgtgacatgtattgagattccaagtggtattgatggagaagcggtacgtgccgatctgcttaagcattttggcattgaaatcgcaagctcctttggaccgctagccggacgtatatggagaattggcacaatgggctatagctgcagaaaagaaaacgtgctgtttgtgttagcagggctggaagcgattctaatcaaacacggtgcatccatccattgcggagcagggcttcaggcggctctttctatctatgaacaaggtgaataaagtcatacggatactcgctatttgcgggtattttttaattggaaaagaaaactaatttttgaaaaactagacttatagacagtgatatcgctatactgaagaagttctgagtttttgacatcattttcatttattttggagaaagaggttttttgatatgaagaaaatgggcagattatacattttgatgctcaatatttttattgccatgcttggctttggcctcattgtccctgtcatgccaagttatattgaagcctttggcgcaacaggaaaaacactcggttttcttgtcgctgcaacaggtcttacacaatttgctttatcgccggttgcaggcgcactgaccgatcgatttggacgtagaaaattgatcattgccgggattgccggctttaccattgcccagtttatttttgcatttgctgatcagctgtggatgctgtttgtatcacgttttttaggcggtgcggccggagctttactcatgccagccatgtttgcatacattgctgatatcacaagtgagaaggaccgagggaaaggaatggggctatttagtgcagcaatgacgttaggctttgttattggaccaggcgtaggcggctatttggtcgagtatgggatcgcttttccttttctcatcgcaggttcctttgcagctctttctaccctattatccatcctgtttttacctgaaactttaacaaaggaaaagcaggaagaagcgcggttaaacaaagacattcatttcaacccttttgtgcaaatgatgcaagctttaaagacatcctacggttttttgtttatattggcgtttgtcctcaattttggcattattcactttgaatcgattttcggcttatatgtagaccaaaaacatggatttacaccgaaggatattgcgtttgtgattacggttgcgggtcttgctggcgtgcttgtccaaggtgcgttggtgaatgcctgtgtgaaacgatttggtgaaatgcgcgtcgtgcgttatgcactgctaggagcggctttgatgctcatcgtctgccgttttgcgccgtccttttggctgatctttacaggctctattttatttttgtcggctacttcatttgttcgtccagctctcaatacattgctgtccaaaatggcaggtaatcagcaaggagtagcgggcggtctcaatacatcctttatgagccttgccaatatcgtcgggccgagccttgcgggcatactatttgatgtgaatattgagtttccttttatgctcggaacactagtgctttgcataagcttcattgcatccatcgtgtgggggaaaaaagtgcagcatacttctgcaatttcttaaaatttgtttataaaaaaaccgatcagcacagattgatcggttttattataatggtcatcaccttttatatgtaacgacaggtgatttttctttatgaagcgcacgaatcatggcatcatctacatgtaaatgctctttcactaattgaggaggggttaaggccatccactgattcaacgaaatatctgcaaagcgatttttgcctcctcgtgtatcacttttctcctccaaactatatgaagcttcggcagaaaacattcaatcaggatggtgtgagagaagcatctgaatacgtaatgctaagcgcagccttaatgtggcttcagggtcttttaagctgatccgaagcagctcctcacacttctccaatcgataaatgaccgtgttgcgatgaatagacaaacgtttcgctgtttctgaaatgtggcaatgcgtttctaaatagacagataaggtgtggaggaggttttgaccagcttcatataacgggtgaaggtgcatctggtgaaacgtgactaaatcctttcttggaataagcttcaataaatctggcacatcctttgcctgatagaactgaatatattccgcctgcgacgagagatgtccggcttgaagagcctctaatgcttcactgtagccctcagacagatgggtgatgcgacaactagtcaagctcacgccaaaggaaatggtgtgattcgcttgtatgctaacgagcatctgcaactgtttcaaaaaagagaggagtctgccactcatctctgaccaacttcctgtctcttccattaatacaatgcccatatcacctttgacaaacagaaaggaaggaaaaggagagcttggaagtgcgctgtcaagtagatcaacgacttgatctaacatcagttgctggttcaaaaaatgagtggtttcatgacaatgatcaagctgacagatcatacatagatagctgttttctacgtttaatccaaacgtcttcgcaatgtatgcagcgtcttgctgagaatacgatgcaccctctatccatctgcgaaacccttcatttctggcacgcttggccgtttgctgggcagtatattgtctcattcgcgcaattgagatttcgtttactgcttgtgcaatgaagacttgcagtgtttcatccagcggaggaatgaaggaagggatgaccacatactcacatgtttgttcggttagatcaatcggaaagacggaaaaggtttgcttcgcatatatcatcgaaaaataatggggtgtccttctttggaaaaaggggagaatgcgaatccaatctgggctcgtgatcatggtgtgcgagttgcagagaatacgtccatgctggttacacaaatagacaggcttgagaatcctttcggcgattttttgcaatgcttcaaactggttatcgtctatgttcatatccactaagtctcctttattgagaactaaagctcttggtgaagatgaataaataaatggacaatcactggtaacttctctgatatgcaatttatgttatcagctcaaatcattttagatagaaagttgtcaactaatatcacaaacaaacagagcgtcaggacaaaatcacgtaccgtcagtcatcttcattcagaattacgggcaaatatgatatgttgtagacagaagaatttctttcagaaatatgggtatcacaagagaaaaaggctttcatgtgaggaagccgtctatacatgagagtggcaagaggtgagaaacatgatttatatcggattaactggctggggagaccatgacagtctttatccgccgaaaatcggcagcgctcaaaagctgtttcactattcatcaacgtttcccattgtggagctggatgccagcttttatgcggttcagcctgagcgtaatcatgaaaagtggatcaaggatacgccagatacctttcaatttgtcgtgaaagcatatcaaggaatgaccgggcatcagaggggcgaaattccgtttgcttcgaaggaagagatgtttgacgcatttattctttcattgactccgctcattcgtgaagggaaactagccatggttctgtttcaatttccaccatggtttgattgcaaaaaagagcacgtccactatttaagatggtgtaaagagaagatgggtgacattccatgtgccctcgaattccgtaaccgcacatggttctcagatgaattttatgagcagaccttgtcctttatggaaaaagaaggatggattcattctgtttgtgatgagccgcaagttggagaaggctccattccgccagtcatacaagctacgcaccgtgataaaacattggtccgttttcacggaagaaataaacagggctggcttcacccagcagaccatgagaattggcgtgaagtgcgatacttatatttatataatgaagctgaattaaaagagtggaaaaagaatctcgacattctgcatcagcaatcaaaagatgtctatgtcgtgtttaataataactccggcggagatgcagcggcgaatggccagcagatgattgatttgctggatattacgtattcaagcctttctccgaagcagttagatttatttagttaaatgagagctgcggctttcaacctgaatgacggttcagtgacaacttgagggagagatcaacatgctgcagaagctatggttatatcatacaaacgacttgcacagccactttgagaactggccaaaaatcgcagcttatattgaagaaaagcgtcaagttcatgatcagatgctcttgtttgatattggcgaccatatggaccgagtgaaccttgtgtcagaagctgattatggaaaggtaaacgtcaagctcctcaatcagcttggctataacggggtcacgattgggaataatgaaggcattacgctgcctcatgatcagctggatcaattgtacgagcatgcacaatttccagtggtcctgtctaatttatttgagaaaggcaaaaggccatcgtgggcaaagccctatcatatgatccaaatggaaaacggactgaaaatatgtctcttaggcgtgaccattgcgtatacacccgtctatgaaaggctgggctgggacattacagatccgtttgacagcatacgggacatgctgcaggaagtgaagggacaggcggatgtcattgtgctcttatcccatcttggtatcatccatgatcgggaggtcgcccgtgatttccctgacatcgacatcatcctaggctcgcacacgcatcatttgttagaacagggtgaaatgaacaatggggtgctgcttgcatgcgctgaaaagtatgggcattatattggctgtgtcgagctgacaattgatacagcgagcaaagagctgatcgagaaaaaagcaacggtgcagtcagtggatcagctgatcagtgaatcagatgaagccatcactaccttacagcaagcagaaagaagagccaaagccctcatgcaggaaaaagtaacagcgattgagtcaaggttagaaacgaagtggtttgatgaatctccgcttccgcagctcttaacagatgccattaaagattggtgcggggcagatatcggcatgatgaatgcaggtatggtgcttgattcattagaggcaggaatcgtgacaagagaagaagtccaccaaatctgcccgcatcccattaatcccattcgggtgacgcttaccggtcaacagctcatcgaaaccgttcggcgtgcctgtgaagaaaaaatggaacagctgcgcatcaagggcttcggctttagaggtgagctgatggggaaaatgctgtatagcggcctcacctttacagtagaagaaggcgaaaccaaacgggtaaaggatgtctttgtacatgatcaattgatcaaaaaggacgcttcctatacggttggcacagtcgatatgtatacattaggctctctatttcctcatatccgtgaccatgaacacattgaatatttcatgccagaatttttacgtgatgtgcttacttggcgcctcaaggaaaccacatgaaatccgctttagcctaacaacactcgccctcttgtcacatagattgtgatgagaggagtgaagggatttggtgaatttaacacctattaaaattgatggacattcctttacagccgtcaccgtcaaactaccgaagacgaattttatggcggtgacaaatgaacatgggtatattatgtgcggtgcactggatgtcgggctcttaaatgaaaaacttgcagatagaggaattatcgcagggagagcagttggtgtgaggaccattgagcaattgcttgatgcccctttagaatctgtgacatacgccgcagaagcgctaggcattacagctggaaccaatggaagagacgcattattaaaaatggtgaaataaaaatggatagatgattcctatccccccgcctgtctgcatacacttgtagtggagaaggggggattttttattgagaatgaaccgccgttatcgcccctataaaaagggccctttgccatttcgatacgtcatgctgcttgcaatcttattctttgtactctcaaccgtcattagtctattttttattaaccgttcaattaaaccaacccttattcacattgctgaactagaaacagagcgtatcgccaatcatctgattcaatattctgttcaagactttgcagacgatcaggagaatatgaaggatatggtggtcatgaatacaagtgagaacggaaaagtaacgaccatcgattttaatgcgcaggcaacatcgaaagcaatggctgatctgtcacgtcatcttcaaaaaaatttagaggacattgaaaaggggaactttcaaaaagaggcaaaagaagcgttaaaggatcaaacagatggacatgacggcattatatataacattccgcttgggcaagcgtccggaaatgcactcatcgccaatctagggccaaaagtgcctgtacgctttagtgtcattggtgacccgcatacggacgttgaaaaaaatattaagccctatggcatcaacaatgccttgattgatattagtgttctgatcgaggtcaaggtgagagtcatcatcccgtttgcatctgaaacaatcgtggtcaagaactcagttcccgtctccatacaagccgttcaaggggacgtaccagattattataacggcagtggaacaaactcaggcgctccatcgattgttctcccagagaaaaaggagaagaaagaataatgaaaaacagcccaaggaatgattgggctgtttttttatttgcgtttccgctcagctctttcccacgcccttaaatgagggtatggatcaaatgaccattcagttctgccgttgtctttatacatgccatagtgaagatgcggcggaaattttcctgctgtgcctggggggccataaccggagcttccgacagatccaatgacctgtccgggttcaacaatttgacctgttttgagtccttttgcaaagccatttaaatgagcgaagtaatgataatgattatgaatatctcgaataccaatccgccagccgccaaagcggttccagcctttcatttcaatcacgccatacgatgtcgcacgaacgggaagtccataatgggcaaataaatccgtgccctcgtgaattcttctgcctccaaatcctcttgcatctccccatgtgctccggtagctgtagtcagctccaaccggaagagggaaagcatgctttccgaggtcaagatggccatagtgctgatatagcttcataaaagatgaaatgattccaacggtttgatctcggccataatagtcccataaagcaatttttaattgatcaatgctgctgccgtaatgaagcaagtattgagcaaacgtgaataatacatcctcatcgtcatcgctgttcgcttttccatccccgtttccatcaagtccaattccatcaaacactttaatgcttaaaggagaggtatcctgcttattcgggttttcagggccgatccacatttcccggggaatgtagataccaatgatgcctttttgtttcggtaaatctcttctgctttttcgaatattgtgctcatactgatcaaccgcagcaagtacataccatggaacttgtgtcgtgatggcgactttttcgtatagtgccattcgctgcttcagtacatctggctgcttgccttccccttgtgcatgaacaggtaaaggaagcattgaaagagcgatcatgatggctaaaaccactttcacaaacgtccatctcctttcatcaagcatcgtcttctaccgtttagtgtggttagatcatcctatttcataagaagaaaatgttagtaattttcttctgatttttttaggaggcttttgggtatttttgcagctcattcccttgttgttcaatctgtactatgttaaagtgtctaaagaaaaggctttaggccgaagattcaattttttgcagcttcttagctgcatccatcgtatatagcaggaagatttttgtagatgcacctttaacgaattcatatggagatgatggaattggcaaagaaggaagagcacgtaagaaaaccggactggcttaaaattaagctgaatacgaatgaaaactataccggtttgaaaaaaatgatgcgggaaaacaacctgaataccgtttgtgaggaagcaaaatgtccgaatatccatgaatgctgggcggtgagaagaaccgctacatttatgatccttggatctgtttgtacgcgcgcatgccgtttctgtgcggtgaaaacaggacttccaactgagcttgacctgcaagagccagaacgcgtggcagattcagtagccttaatgaacttaaagcacgctgtcataacagcggttgcaagggatgatcaaaaggatggcggagcaggtgtgtttgctgaaaccgttcgtgccattagaagaaaaagtccattcacgacaattgaagttctcccttcagacatgggcggcaattacgataatttgaagacgttaatggacacacgtcctgatattttaaatcacaatattgaaacagttcgcagattaacgccaagggttcgtgcacgtgctacatatgatcgttcattagaattcttgcgccgcgcaaaagaaatgcagcccgacattccaacgaaatcaagcattatgattggactaggtgaaacgaaggaagaaatcattgaagtcatggatgatcttcttgcgagcaacgtggatattatggcgattggtcagtatttacaaccttcgaaaaagcatttgaaagttcaaaaatactaccatccggatgagtttgcagagctgaaagaaattgcgatgtcaaaaggctttagccattgtgaagctggaccgcttgtgcgctcttcctaccatgcagatgaacaagtaaacgaagcgtctaaaaagcgtcaggcgcaagcataacaaagaaaacgccagagatctctggcgttttttctcatattaattttggccgtaaggggcgtttcttctcatggtacggtcagaattcgtcataccatttgcatcttctttcgtagaaatatctccaccttgaggggaatatttcatttgttgaatcgttttggttaaaatttgatcaaaatcacgtgaattggtttgaagacgtgaaaaattggcaatggattgaaagtgctctggattatcagagacgtatacatgataataacgagggagaacagaaaccgccgttttctttacttgatcggcagattcatcccggtttttgtttcctgttcgatatacaatcagtgcatcctcatctgtcacaagtgtggctgcatctttgatgtttgggagctgcacagttaaacttgtaatgacgtgggcaagatgctcgcgatttaaagcaggtgttctttctttctgatccgttacttgctggcgctgataacgaacatatcctgctctgtttgtgtctgcttctggcatgttggaattatttccttcatgacgatccgatagacggatggttttacttgaagaatcttcatccacttgccggttcatacctgattgaaagccgcacccgcctaaaagcatgctgaggagaatcgcggctgtcagttgtttcttcataaatgtgacctccttttttctttagcttcggctaaatcggaaaaaacatgctttagcaattgatggagttcttccaatgaattatcattaaagatggatcgtttaaaaagaggtgagaagatgatcgtcattcagaatgctacttttgatcttgtaagagagattaaagacggttttgatgaagaagcgtttaaagcaaggtactcagatattttaaataagtacgattatattgtgggggactggggctacaatcagctgagactgaaggggttctttgatgaccaaaaccaaaaggccacatttgatacaaaaatcagcacacttgatgaatacatttatgaatactgtaattttggctgtgcctattttgtcttaaaacgaatcagaaaataacgcaaaggggagcgtcatgatgtatttcgtagacagaaaaaaaattgaagagacattacgttttttcgaggagcaatatgagttgatgcgcagtcatcaaacatggacaagtccactagagaaaaaagcgctggaacgaattgttcatttgctcgtcgaatgtattcttgatacgggaaatgatatgattgatggctttattatgcgtgatccaggaagctatgatgacatcatggatattcttgttgatgaaaaggttgtacccgaagaggaaggcagtcagctgaaaaagcttgtctcgtgccgtaaaacacttgtgcagcaataccaggaagtggttcatcacgacttgctgcaggtgatcagcgaggttgagcatgcgctagaggttttcccaagccgcatccgtacctacttggagcaggagcttggcccagtatcagcgtttaaataatccattggagttgtgagcatcatgaaatacaaaggctacttaattgatttagacggaacaatgtataaaggaacagaaaagatcgaagaagcaggtcaatttgttcaaaagttaaatgagctaaacattccttacttgtttgtcacgaataactcgtcacgcacgccgaagcaggtagcagacaagcttgtttcattcgatattccagcaactgaagaacaagtctttacaacaagtatggcgacagccaattatattgccgagcaaaagaaagacgcgtctgtttacgttatcggtgaagaaggaatcaagcaggccattgaagaaaaagggctaatgttcggtcaggaagacgctgatttcgttgttgttggaattgaccgagacattacatatgaaaaattcgcagtaggtgcgattgccattcgtcaaggcgcacaatttgtctcaacaaatggtgatattgccattccaacagaaagaggacttctgccaggcaacggctctttaacatctgtattgactgtcactactacggtcaagccaacatttatcgggaagccagaatccatcatcatggaacaagcgatgagggtgctcgggaccgatctgtctgagacgcttatggtgggtgataactatgatacggatattatggcagggatgaatgcaggaatggacacattactcgttcatacaggcgtgacaacaaaagagctgcttcagaagtatgacaaacagccaacctatgtcattgattcattatccgagtggattgagcgattatcataaaaaaaagaggacaagcgttacgcgcgcgtcctcttttttgctttattccgcatttctcgtactatgtgcaagcctgcttgatgctgcagcagcaatggcgccgacaatgtcatctaaaaaggtgtggcactcgcctgtggatttatcattgagtttcccgagaatccctggtttttctttatcgatatatccgtaattcgtaaagccgatcgaaccataaatattgacgatagcaaaggatagaatttcatcaacaccatacaggctttcgtctgtttctaaaatggactgaagcggctcggttagctttttttgctcggctagtacgtctagttcgacgcctgttaatatcgcattttggacttctcgttttgcgatgacacgctccacattgtggatgcattctgtcatgtctaagccaggatgatatttttcctgtaaaaagtagacaaggtctgctatatcttgaatggatacgcctcgttcttgtagacggcgtcttgctgttttttctacttcgttcatctcatgatgatgcggcatatattcctcacccaatcctcgtaatttggtccacaacgtgtaaaaagcttcggatagtaaatagtattcataaatccctcaacctgcgactacgatatgataagagatcgatcatatgaacgcaggtgaaaacatgaaagaaaccatttatcacacatttggtattgatgtgcgtcaatttatgccatatggcagttatcagagctttcaaacgtcagagactctcttcatcattgtccctgtgtctcatttgcgagaagaagaactcacagagctgtatcatatcagtcagtatttactgaatgccggagacccatacgtcgctgtgtttgaattaacaaatgaagagaagcccacctttactcatggaaaggaactgtatgctttattaaaggcagcaccgccgatctcaagccgctcgttccagcaggcgtcagagctggcggcctttcatgtcaggggaagagggtttccatatgaggtatctgaaacaaaacgtgtgggagcctggaaggaattgtgggcaaaacggttagatcagcttgaaggcttttggatgcagcaaatgcaccaaaaaccactggaacagtttgaaaaaaaattcatcgaatcctttccgtattatcttggattaacggaaaatgccattcaatatttagtggatactgagcttgatgatgaaccgaaggaatgtgactcaggcactgtctgccaccagcgtttttcgcggaggacttggccgcatgagcagccgcttcgtttacctgtagattgggtctttgatcatccaacccgggatattgccgaatacttaagagaaacctttgtccagcataaggaagatttaattgaagaaggcttctcctttcttcagcaatatgagcaggtgacacctctttcttccttttctaagcgtttgttatacagccgcttgttgttcccgcttcattattttgaaattgtggaaggctactacatgtcaggagaaaatgaaaaatcatattatgaagagcggttagattacgtcctaaatgatgccaatcgctatgaatactttctgaaggtctttcaagaaatgagtgccatgcgaagcggcgagagcccgataccgtcagttggctggatcacaggtccagggatttgaagtttcagtgaacagatgaaacgtctcttttctcttgaggcgtttttcgttatgcttaaagaaatcaatcaaaggagtgttcttcttgccgaaaccttatgtctatatcacaagaaagctggatgaagcatcacttacaccattaaaagaagtcgctcatattgagatgtggccgagcgaggatgagccatgtccaagagaagaattagaaaaacaagcagctcaagcggatgcgcttctcaccatgctgtcagatcaagtagatgaagcccttttatcaaaaactccaaatgttaaggtgatcgcaaaccttgctgttggctatgacaatattgatcttgaggccgctgaaaagcgcaatatcactatttgtcatacaccggatgtattaacagaatccacggctgatttagcctttgcccttctgatggcgtcagccagacggattgtcgaggcgagtgattggattaaggaaggaaattggacaggctgggggcctcttcttcttgccggcgctgatattcatcacaaaacccttggaattgttggcatgggcagcatcggaacagcgcttgccaagcgggcagcaggctttgacatgaaggtgctgtaccataaccggtcaagaaagccagaggcagaagcgcagctcggcgtgacttatgcgccatttgaggaactgcttacgcagtctgatttcatcgtctgtcttacccctttaaccccggaaacaaaagacatgtttaatgaaaaagcatttgatctgatgaagaactcagcctattttattaatgtatcaagaggacagactgtggatgaggatgctttatatgaggcggtcacgacaggaaaaattgccggagccggtctggatgtatttagacaggaacctgtcagcccgtctcatccgttaacaacattacctaacgtcacggttctccctcatattggaagtgcaagtgtcgaaacaagaaaaacgatgatgcgtttgtgtgctgaaaatattgcgcttgtcttacaaggtcagcaagccaaaacgccggttcgttcatcatataaggctccctgagtttcgggagcttttttgacaaaaatattttgaaaatatagaatcttgatataaatagctattaagcggtttcattctgacaatctcttattttattaccttgtcaaaatgaggatacccctttataatgtgtgtacattgaatgtctgtgttaggttaacaaatgtctttttagagaggacattgacggagaaaggtggaatttcaggtgaaggcaattcgagttggactattaggattaggaacagtggggagcggtgtcgtcaagattatccaagatcaccaggataaattaatgcaccagatcggctgtccggtattaatacaaaaagtgcttgtgagcaatcccgataaaaagagagatgtggatgtggcaagagaggtcttcacaactgaagtatacgatgtgattagagatccagaggtcgacgtcattattgaagtgatgggcggcattgaagagacaaaacaatatttaatagatgcgttaaatgagaagaagcatgtcattacagccaataaagatttaatggcgctttacggaacagagcttttacatgttgcgaaagaaaatggctgtgatctttattatgaagcaagtgtcgccggaggaattccgattctgcgtacactggaggaaggattggcctctgaccgaattacgaagatgatgggaattgtgaacggcacaacgaattttattttaacgaaaatgaacgtcgataaaagcgcatatgaagatgtcttaaaagaagcgcaggatcttggctttgcagaagcagacccgacagctgatgtagaaggacttgatgcagcaaggaaaatgacgattcttgcaagactcggcttttccatgaatgtggaattagaggatgtaaaggtcagaggcatctctgacgtgtctgatgaagacattaatttcagtaaacgatttggctacacaatgaagctgatcggaattgcccagcgggacggagagaaagtggaagtcagtgtccagccaaccttactccctgatcaccatccgctatcatcggtcaacaatgaattcaatgcggtgtatgtctatggaagtgctgtaggagaaacgatgttttacggccctggagcaggaagtctcccaacggcaacagctgttgtatcagacttagtcgcagtgatgaaaaacatgcgccttggcgtgaacggaagcggatttatcgcaccgcagtttgagaaaaagatcaaatcgccatcggaagtatttgctcagcaattcttaagaattcatgtcagagatcaagtcggggcattctcccgcattacatctattttttctgaaagaggcatcagctttgaaaagatccttcagcttcctgtgaaagggcatgatgagctggctgaaattgtgattattacacaccggacctcagaagaagatttctcaaatatcctgcaaaaattaaacgatctcgacgtggtggttcaagtgaagagcacgtaccgagtagaagggaacggtttaagctgatgaagtggaatggacttattgaggaattccaagaattcttaccagtaaacgaatcaacaccaaaactaacattaaatgaagggaatacaccgctgatccaccttgccaaactttcggaaaagctgggggttgagcttcatgtgaaaacagaaggcgtcaatccaacaggctctttcaaggatcgtggaatggtcatggctgttgcaaaggcaaaagaagaaggcaatgatacgatcatgtgtgcttcgacagggaatacctctgcggcggcagcggcttatgcagcccgtgctgatatgaaatgtatcgtcatcattccagacgggaaaattgccttcgggaagcttgcacaggctgtgatgtacggagcagagatcattgcgattgacggcaactttgatgatgcgctgaaaatcgtccgcagcatctgtgaaaaagcgccgattgctcttgttaactctgtcaatccgtaccgaattgaaggacaaaaaactgcggcatttgaaatctgtgagcagctaggctcggccccggacgtactggcgattcctgttggaaatgcagggaacatcaccgcctactggaaaggcttcaaggaataccatgagaaaaaaggaactggactgccagtcatgcgcggctttgaagcagaaggtgcagcagcaatcgtacgaaatgaagtgattgaacagccagaaacagtggcaactgccatccgtatcggaaatccagcgagctggaagcaagctgtggcagccgcagatgaatcaaacggaaagattgatgaagtgactgacgaggaaattcttcatgcatatcaattgattgcacgtgaagaaggcgtgtttgcagaaccgggctcttgtgcgtctatcgcaggtgtgctaaagcaggtgaaatccggagaaatcaagccaggcagtaaagttgttgcggtattaacaggcaacggattgaaagatccgaatacggcaattgatatttcacaaatcaagccggtcacactcgatgcagatgaagatcaaattcttgaacacttagaaaaggccgcgcgcgtatgagtaaagcctccatgctttttacaatcacagtaccgggaagcactgccaatttaggaccaggctttgattcagttggaatggcgctcagccgctatttaaagctatcggtctatgaccatgatagctggctgtttgaagcagaaacagatgtcgtgtccgggattccatcaggcaccgacaacctaatttatcaaacagccaaaaaggtcgcagatcactttggaaaaacactcccgcctgtttatgtcaaagtgtggagtgatattccattggcacgggggctgggaagcagtgctgctgcaattgtggcagccattgagctggccaatcagcttctcgaattaaatatgacagatgatcaaaagctcttttttgcaagtgaggtagaaggtcatccagataatgcgggtgcttctttattcggcggtttactgattggtcttcatgaagaagaccagacacatgccgtcaaagtgcagcatgtggatatagatgttgtcgtcgtgattcctttttatgaagtgctgacaaaggatgcccgtgatgtcttgccagaggatctttcctataaacatgccgtcagtgcgagtgctgtgagcaacgtccttgttgctgcattaatgacacaaaactggccgcttgttggagaaatgatgaataaggatttatttcatcagccttaccgcacaatgctcgtcccagagctgtcgaaggtagagcatgtcgcttcgctaaaaggagcgtatggaacggcattaagtggtgctggtccgacaatcttaaccttagttgaaaaagggaagggagaagcgctgttagaacagcttgcccaaaacttcccgcattgcgaagtagatttgctgacggtaccggtagaaggtgttgtcgtggagcatgatcctgtcaatcaagtaaagaacgtgctgtaaaaatgcacgttaccagcgtgtagacaaaccctcgcattcggtgtcagtcctacgtgctggtgctcacgaatgtcaaattcgctccgtgccagtactcgtccttcctagactgcaaaggttttctatcacgctgaaaagaagaaaaagagctaaaataaagatcattttagccctttttcaataatctgagaacgtgctgtaaatctgcacgttctttttttatccttgtttttataggaagaagcagggattattatttagaggatcgaactattttttatgcgtaaaagggggagatacattcatgaagaaattgatgacggcagaagatttaacgaagattgtttctgtttctcatccggtttattcaccagatggaaaaaaggcggtttttacaaaagtcacggtgaatgagaaaaaagatgattacaacatccatttatgggttcgagatgaagagacagaggagctgtcacaatggacatttgaggatggaaagcatcatcagccagtgtggtcaaaagacagcaggcagcttgcttttattttgcaaaagccaaaggaagttcctcagctggcactgattcagagtcagggaggcggtgtgcgcaccttaacggcgattccatacggggtatctcatcctgtcttttcaccagatggagctttcatttatgcggctgtgtcactgaaacaatcagaatctgttcatgatgaaaaaaaggaagagcgagatgatttcgctcctgcggtatatgatgatttgacctataaagcagatggcagaggttatttagatgggcgtttcacgcagatcattcaagtggatacccactcaggagaggtagaggctgtcacgagcgggcagcatcatcatgtgagtcacacggtctctccgtgcgggaaatggcttgcctatattcaatcaaatcctcagataccttacataagtgacgtgtgcctcctgtcattagaggacagtacgacaaagaaaatcacacaatcagctggcgcttattccaccgtgtctttttctccaaatggagagagcctcgtgtatatcggacatgagcgcgaatttcaaaatgctaccttcccagcattatggctgtatgatctgaaggaagaaaaagtagttcagctgtcagaaatgctcgatatgtatgtgggcaactgtatggcaggagatagcgtcatgggcgaagccaatcagcttccgcagtggacaaaggatagccaggggttttatgcgcttgtttctgatcaaggcagtacagggatttattatttctccgttgaaggcttagcctatccagttcgattagaggcagaacatattacaaacttcagccttcatccagatgaatccaaattgctgctcagccggcttacgcacgtttcaccaagtgagctgtatgagctgacattaggggaggcggatctaaagcaaatcacgttcgagcatgacacctttcttaaggagcatgtcctatcggtaccagagccattttcgtttcagtcaaaagaaggtgatgaggtgcatggctggtttatgaagccttcccaaatggaagacgggaagaaatatcctctcattttagagattcatggtggaccgcatgcgatgtatggttatacgtattttcatgaatttcaaatgctcgctgctgaaggctatgccatcgtatatatcaatcctcatggcagtcatggatacggacagatgtttagcgaccgtgtgagaggaagctatggtggcgttgattataaggatgtcatgcaggctgttgatcatgtgctcaaagcctatgatttacttgatgaaacgaggctcggagtaacaggcggtagctatggaggttttatgacaaactggattgtcgggcaaaccgaccgttttcgcgcagccgtcacacagcggtccatttcaaactggattagcttttatggcattagtgacatcggttattacttcacaagatggcagattgatggggatatttatgattcggccgataagctatgggatcgttcgccgctaaagtatgtgaagcaggtgaagacgccgcttctcatcttgcacagcgatgaagactatcgctgcccagttgatcaagcagaacaactttttgtagcactgaaggagcttgggaaagacacaaggctcgtcaaattcccgaaggcatctcatgatttatccagaagtggccatccggggcagcgtattcaaagactgacctttatgaaggactggtttagagagaagttaagttaataatgaaaaaaacgacccgaattcgggtcgttttcatgtcatatatgaattagaaaacctgttcaacttctacaacgccaggcacttcttctaataatgcgcgctcaataccggctttcaatgtaatggttgaacttgggcagctgccgcatgcaccaagaagacgtaatttcacaatgccatcttcaatgtctacaagctcacagtctccaccatcacgtaatagaaatggacgaagtttgtccagtacttcctgtacttggtctttcatttcgacttcagtcattagatataatcgctcctttcacaacatatcaccattatattcatctggacgataaaaatctattgattggtttcaaagtttccttctcattatagcacaatctcatcttgaaacaaaaagtgattttgacttttttcatacagaaaattcagctaaaataaagaaagaatagggggcttgccaaatgaatcaaaccgttgatctttatgtatatggaagagatgtactgtgcgctagctgcgtgaatctgccttcttcaaaagacacatttgagtggttagatgcagcgttaaaacgaaaatatccgaatcagccgtttcgtatcacatatattgatattgagcacccgccagaaaacgaacaccaaaaagaattgtctgaacgaattcttgatgatgaattcttttatccgcttgtcttagtggaggatcaaattgttggagagggcaatccaaaattaaaagacatttatcaagaaatggagaaatacggttacacggagagcagtgaataaactgttctttttttgagaaaacaaacagaacaaacgttccttttgggttgaaaaagaacgtttgttcgattataatcaaatgaaaggagcgtgagcatcatgaattatttactgaaacaatctcttcatcagcaaataccaattgagatgatttatatgaagaaaaacggagagtgcacgaagcgtaaaatcattgtccaccgtcaaacagaccagctcatccaagcgtattgtttatcgaagaaaacgatgagaacctttcgtaaagactgcatccttgcccttgctccgattaaattgacccgttcatcggcacatgccgtttcatagaaaaaaagctccctcgtcatgaaggagctttgagaaaaaattcacatgatgttagccattgtgatgcttgtacatccaaaggagtccggattttagaagtcttggtacacggccaataagtggacgatctgctactaagccaaagccggcttttttccctaaagatcctaagacaccttttagcttaaactgaggataagcctcaggaagcggctcgtttttccagcgtttttgcagagattggacaatttgttctgcctgcgcctcggcaagctgtgcacttggggcatgcggcaagcttgcgcaatcacccacgacatagacatgctcatttccagggagattgtgatgaggtgttaatacgacgcggccttgtgcgtctttttcaacatccatctcccgtaccactttgcttggctgaatgcctgctgtccatacgatgacctctgcttcaatggcgtcatcatggttgtaaacaacaccttcttcaaccttcgtaatattggcacagttaatgatctttacgtcattttcttcaaaccacttttgcacatataaacttaatctttttgggaagcttgatagaatcagctctccgcggtcaaaaagaataatgtttaaatcagcacggctttctcttaattcactggctagctctaccccgctaagtccagcaccgacgataccaaccgttgcacctgcacccaaattgtttaatttgttatacgtatgtcttgactgatcaatggtttgaatactgtatgtatgttctttcgcaccagggacattatgatacttgtcctcacagccgagtccaatcaccgtgtcgtcataaggaatgggttcacggtcgctgaataagatttgtttgttttcaatatcaattttttctacttccccatattgaatatccagcttcggatgctctggaaaagatactcggatgtgatgatcagagattgttccagcagcgagtgcataatattctgtttttaaacagtggtaaggatttcgatcaactaatgtgatagtaacatcatcaggtaattgatttggcaataagcggtggagaacccgcatattcccgtaacctccgccgatcaagactaaatttttcatgacgattctccttttccccgtagacattgaaaaacacttatactaaaaaactttaagttaaaataccaaataaaattatatcgaatttactgtgaaaccacaataattgtttcaaaataacctacatattcattagttagtcctaaatagtaaaacattttacgaggaataggcgtaacgatacagatgaagctcatgttttgactaatagaaggaatttcggtaggatggtaaagcaatgtgaggtgaagcaaagtgttcccactgatcgaattttgtgtaagtaatcttgcacaagggtctcaagaagcaaaagagaagcttgataaagacccaaacctagacgttatggaatacggctgtttaagctattgcggcaaatgtatggactccccatttgcacttgtgaatggagaatttgtttcaggagaaaatgcagagcagctagtcgagcgtatttatgcttttatagaggaaaatgagatgttttaaatgcaccacatgggtcatgaggtgcatttttttcttacttcaatcttccatttttaaggagaatgcatagaaagcgcatccaatatgttatgctaataaaatatcatcaaaatgaagcatcacacgagaaaaaaagaggcatatgcataataaaagccctttgccatggcagcaaagagcttctatgtatgaaaaacgggggatgataagattgtctcctgaatcgactccttttatactataaagaaacaacatttttggaggaagctcatgacatcatttcaattcacgaaaatgcacggattaggaaataattatatatacgtcaatcagatgaaggaacagcttccagaagagcagctatcagagatagcgatccgcgtttcttctgtttatacaggaatcggttcagacggaatgatccttatttgcccatcagatgttgctcctgtgaaaatgcgcattttcaacaatgatggatcagagggtaaaaactgcggcaacggtctgcgctgcgtcgcaaaatatgtgtatgagcatcaaatcgtaacagacacaacgttccagattgagacattgtcaggactcgttgaagctaccgttcacgtgcaggatggtcacgttcatttagtgacagtagatatggggaaacctcgttttgaaaaaaaagcgatgccgatgcttggtgaaccggccagcacaacgattcatgaagcacttgattttggcactgtgactttaaatggaacggctgtttcaatgggaaatccgcacatcgttttttatttagaggacattgaaaaggcaccgcttgatacaattgggccaatcatcgaaaaacacgacatgttcccagaaggcgtcaatgtagaatttgtagaagtggtcagtgaaacagaactgcattttcgtgtgtgggaaagagggtctggcattactcaagcctgcggaacgggagcttgcgctgcggctgtatccacgattgtgaatggacaggcgaaaaaagaaacggacatgacggttcacttagcaggcggagatctcatcattcgctggaaagacaacgaccatgtgctcatgacagggcctgctgaaacgatttgtgacggcacattttatctgtaaaccatttatttgagaaaaggcaccatcacgtttataattgaaaagaaacatccagtcaaaaggagggatgatcatgagtacaccagtaaccattacagaagctgctgcactgcagattaaagatatgatgaaagaacatgaagaagaaaatgcgttcctacgagtgggcgtaaaaggcggcggatgcagtggtctttcatacggcatgggctttgaccatgaagtttcagagaaagacacgcagttcgaacagcaaggcatccaggtccttgtcgactccgaaagccttgatatcatgaacggcaccatcattgatttcaaacaatcactaatgggcggcggtttcaccatcgacaatccgaatgcgattgcttcatgcggatgcggttcttctttccgaacagcgacgaataccggtacgccggaagagtgttaacaactgatcatggattaagataagccttcttgttcgtttgtttttgtaaacaacacgatcgaggaggcttctttgatgaggaaaatgaaccataaaaaagacactcattcagtgtctctttctcatattgcttcttctattttcaacagttctttatccaggacatccaccaactcttgggtgctaaacatatagatcaccacttctttattgccatcttccacatggacttcaatcacaattttaatatttgcgagtttttcatggtacaccacttcataagtgcccatttttttcgtttcattgtttttattcattttttgaactttggagagtatctgtttgatttcttgatcactcaaaccagaatctaaaattgaagtggacacacgctttaaaaaaggtcctagttgatcaacattaatattcaatcctgctgcgaactgagcataatgtttgttatagtcttttgcaaacagttctactgagccaccaatcatcagtaataagcacaaactgatcattaaacgctttaacatctttccacctatccttcattatgaacttcttcatttcctatatcggttgatcagatgaaaccttcattgattccattatctcttcaacaatttataaatcgctcaattttgttacagcttgccctcacaactggctatttccacccaaaaagagtatcatgataaccaaacataaactgtaggtagagaaaagaggttgctgaggtttgagtgaacaaatcaattgcaggaactgtcatgaactgattccgtatcgttccaaaacgtgtccagcttgcgggattgagaagccgcttccgaaaaaggaacgtgtgaaggatcgggtgattttggttgtggcagggattgttgtggtgctgcttgctgcaatggtacttggaatggcgaatgcctatattggggtttttaaataaacgaaaaaggagttccgctagtgagaactcctttttttgatccgcttttatttgttttcaaataagcttgtggaatgaagaggctgtacacgggctttcgggtccatgtaggctttcgcattgttgacagccgttggtgcttcaccaaatccgctggcaatcaatttgacctttccttcatacgtgcagatgtctccagccgcatagaagccttcaatgtttgtttccattgtggatttcacgacgatcgagttcttttcgatttcaagaccccattgtttaattggtccaagggaggaaacaaaaccgaagttgacgatcacgtcgtctacatcaagcacttgttttttgtcgcctttgacttcttcgagcacaatctgttcaatgcggtcttcaccaatgagctcagttggcacaaatggtgtcactacattgactttcgaattgtgcaggttttctacactgtgctcatgggcgcggaatttatcacggcggtgaataatggatacttcttttgcgataggttcaagcattagtgcccagtctactgcagagtctccgccgccaagaacggccacacgtctgccggcaaattggttcaaatcattaatgaagtaatgcaggttgcttccttcaaatgattctgctgcacctagctcaagctttctcggttggaatgcaccgttaccagctgtaatgatgatcgttttagaataatgaatctcttgatttgtcacaagtttaaaaatgccatctgcctgcttttcaaccgtttcaactgcttgctctaagcaaatggtttgatcaaatttatccatttgttcctttaagttatcaactaattcttgtgcgcggatttttggaaaaccagccacatcataaatgtatttttcagggtaaagagcggataattgaccgccgagctgaggaaggctttcaatgattttcacacttgcctgtctcatgccaccgtaaaacgcagtaaacaatcctactgggccgcccccgataacggtaatgtcatataccttagaatcttcttgcattcctttaatcctcccaaatgaaaattgttatcactatatcatatcataccacatatcgtcgtttgacttgttttgaaaaacttgtcgttttttgatgccgaagctttgaaaaagaggaaaaagtgagaaagaccgtttatcataaggattttcagtttaaagccttgaaaaaaggagcagaactcgctattattgttaagggaactaaatattaattttttatgaatttttgtcggatacggtcaaatgctttcgttttatgtaggtgaaagttcagattttcacatacttatttttttgtttaaatttcataaaatgccggaaagcggttgagaatagcaatatgtaattctttatccgttttacagcaaatttaaaaaaggtggatgtgattccagtgaataaaccgaaaatcgttgtattaggtgcaggttatggcggattaatgactgtaacaagattaacaaaacagcttggcacaaatgatgcggacattactcttgtgaacaagcataattatcattacgaaacaacatggttacatgaagcaagcgcaggtacacttcatcatgaccgctgtcgttatcaaatcaaagatgtgattaacagttcccgtgtcaactttgtacaagcaacagttgaaagcattaataaggaagcaaagaaagttgtgacatcagatggcgaactttcttacgactaccttgttgttgcacttggtgctgttcctgaaacatttggtattgcaggactgaaagaatatgcattctcaatctctaatatcaactctgctcgtcagcttcgtgagcacattgagcttcaatttgcgacgtataatacggaagctgaaaaacgtccagagcgcttgacaatcgttgtcggcggtgcaggcttcacaggtattgagttccttggtgagcttggaaaccgggtgcctgagctttgcaaagagtatgatattgatcaaaaagacgtacgtatcatctgtgtagaagctgcaccaacagctcttccaggattcgatcctgaattgatcgactatgcaatgaactaccttcaaggtaaaggtgttgagttcaaaattggtacagcgatcaaagaatgtacgcctgaaggcatcattgttggaaaagacgatgatacagaagaaatcaaagctgaaactgttgtttgggctgctggtgtacgcggtaacccaatcgttgaagaagctggatttgaaaacatgcgcggccgcgtaaaagtgtctccagatcttcgtgtaccagaaaatgatgatgtattcatcatcggtgactgttcattgatcatcaatgaagaaatcaaccgtccatacccaccaactgcacaaatcgcgatgcagcaaggtgaaacagtagcgaaaaaccttgcagcactagttaaaggtggttctcttgaaagctttaagccagacatcaaaggaacagttgcttctcttggtgaacacgacgctgtaggtgttgcgtttggtaaaaaacttcaaggaacaaaagcttctgcaatgaagaaaatcatcgacaaccgttctttattcatggttggcggcccaggacttgttctgaaaaaaggaaaattcaagttcttctaaaccttaatagacaaaaacgtgtatcctcgtgatacacgttttttttatgacgtatggtatattttcttacttggtcatcggaagcaaagtatgttatgatgaattatcagaaaatttagattaagggagtgagcaatatgaatgcacaaacaaaagaaaaaaaatccacctgtcaatattgttcggggaaagggtattttcagctattgctcggcggatctgaaacatgtgaggaatgtaaagggacaggaaagaagctttaatccatctgctttttccattgattgacttcatctctatttccaagttaaactaatgatgggatatttgggggtggagatgaagtgatcagtttaccagtcgttatcatttcagttattttatttttcgtgttattcttcggcattggctttttgctcaatatgctgctcagaatgtcatggattatggctattttatatccaattgtatgccttttcattatcaataatcaaaagatgatcgcttatgtcagagaaccgggcattgctttttcagggataggagaacgcattgtctctctcgctgcggcagatatcattatcttgttaagcggtctgattggtgcaattgcatcaggttttgtcatcaatgcacttcgaaaaagagggtatcaaatgttttaactcacttgtagacatgcaagtgggtttttttgtttctcctttgcatagtttccattttgtttggaaacaaatagatgggtagaggagtgacaaataaagatgaaaacatggatgaaacgattgttcatgacagcccttttcatgcttgctctcttgacaagctttacgggcatatctggagttgaaccaagtgatttagctgcctgggtgaaagagactgaccctggcaagcaagtatcttcttttttccaacagcaaaaaagggaaacgatggcactcaaaagtgatgacttgcgggctgtttctctcgaagaagcgtttaattggaacgattacccgaagcaaaaggttgtcgccacaggttatacagcaggtgtggaatcaacaggtaaaacgaaggaacaccatgcatatggcattacatattcaggggtcaaagtgaaacgtgatttatattcaactgtggctgcagatccatcagtctttccaattggaactgttctctttatcccaaactatggctacggagtggtcgcagatacgggaaaagccattaaaggtcataagcttgatttatactatgaaaccgtagatgatgtgtatagagaatggggtaaaaaagtgcttgatgtgtatatcatcaaaaagggcgaaggaacgttaacggaaaaagaccttaaccagctgaatgaagcaaaatcaatgcaagtattccgtcagcagtttcaagccaataaagaataaaaaaagctttggacaagttttaggtccaaagcttttttcgcttctacatgaagtaataatctaagatgagtgtcagtaagatccctgttaagccgccaaagaagacttcaatcggcttatgaccaagaagctcttttaatttcttttgcttttctttttcttctgcactcgggaaattctttgcttcagaaacaaatcggttaaaatctgttacgagcttgttaagtacagtcgcctgttctcctgcctgtctgcgcacacctgtcgcatcgaacatggtaataatggcaaagatggcggaaatggcaaagatagatgtatctagcccgtgctctaaagccactgctgttgagagtgctgttacggctgcggagtgtgaacttggcattccgcctgtgcttgtaatgagcgaccaatctagtcgtctagaaatgataaattgaatcggtacttttacaaattgagcaaaaaagatggctgcaaggctggcaagcagcggaaaattcatcagtacgctcatgaacaagaaacatcctctctgtaagaaaaaatatggtgcgaaatgatggactgtataccctagtaagatgaaaaaatgatagcagtatcaaatgctgccaagtccatgttcaattataacattaaagaaagtagatgtggaacgaggagaatgcaggcgggctgctcaagttttcatcgcttttttcatgatgcccttccgcgtgtgaaaatataaatgttcatcaagtaaagacagactggcaatgatcgtataggcacgtaaattttgatataatagaagttccaatgtgaaaaatggagttcattgaaggagcgtgtgataaatatgtttttctcgacaaatgaattgcaacataaagatacactggcgattggactttttcaaaagagccaattatcaggaaaagcaaaagaaatggatgaattacttgaaggacgaatcactgaattattaaaagaaggcgatatctcttctaaacgaaatcagctttcgaagtttttcccatcccctgagacaggcatcaaacgcatttattttgtcggacttgggaaggaatcagattacacgtttgaagaggcaaaagaagggtttgcccatttatttaaaaagctccatcaagataaaaagcaagcggtttcggtcttgctggatacgtttattggaaaggatctgcctgcccaagatgcagcccatgccctttctgaaagctgccttttagctacatatgaattacaagattttaaacataaaacaaatgaaccggatcgcttcatcgagtttgtttatgcaacgacggatcatgatacagctgaaattcaggcaagtctgaaagtgggcgaggtctacggacagtccgtcaattcggcccgtacccttgtgaatatgccgccgaacatgctcacatcctctgatctggcttcgtacgcggcagagcttgcgtataaatacgaatttgagattgaaattttagataaagaacagatggaagagctcggcatgggcggaattctagctgtcaatagaggctcaacagaaccaccaaagctgatcgttctgaaatatcaaggcaaggaagaatggacagacgtcatcgggcttgtcggtaaaggtatcacgtatgatactggtggctattctttaaagccaagagccagtatggttgggatgaaaacagatatgggcggctctgcctctgttttaggcgccatggaaatcattggtgaactgcgcccagagcaaaatgtcattgctgtcattgcctcgacagacaatatgatctcggctgacgccatgaaaccggatgacgtcattgtgtcacttagcggtaaaacaatcgaagtgctgaatacggatgcagaaggccgtcttgttttagcagatggagtgacatatgcgaagcagcacggtgcctctgtccttgtagacgtggccacattaacaggcggggtcattgtggcacttggaaatgagacaacaggcgtcatgacgaataacgatgaactatatgctcagtttaaagaggcatcagaagaatgcggtgaaatgatttggcagctgccaatcactgaaaaagataaaaagcgcgtacgaaacagcaaaatggcggatctcaataactcaccaggccgcgatggtcatgcgatcatggcaggagcattcattggtgaattcgctgaggatacgccttgggttcacttagatattgcaggaacagcaacaacagaaaagccttcatgctttgggccaacaggggcgacaggtgtgatggtacggtcattggccacatttgtggaacgatttgaaggaaagaaataaaggatcaggctctgccaaatggcggagctttttttatgtaggacatacgccatttgacgaagaaaattttctatggtaacatacgttggtactttaattatctactacattagtaaactaaaggatttcgggggtttcaccatgaatgcagttgttttagcggttgttttaatgttgatattaagcttgctgcgggtcaatgtcgtgattgcgctggcactcggtgctttagctggcggacttgtaggtggattaggcctgggaggaacagtggaagcctttactgacgggctcggaggaaatgcgacagttgccattagctatgcacttttaggggcatttgctgcggcgctgacaaaaacgggtcttccagatgccatggttgaaggagcagtgaagcttctaggaaaagaaggcgactcaagaagaaaaacattatcaaaagtactgatcattcttgtgattttgatcgtatcttgtttttcacaaaacgtcgttcctgttcacattgcctttattccggtcttaattccgccattattaaaagtgtttaacgagcttcaaattgaccgcagactgctagcgtgtgtcatgaccttcggactcactgcaccatatattttacttccagtcggttttggacagattttccacggaatgctccgtgataacatgaaagaagcaggattgactgttcaattaacagatgttccattggccatgcttatccctgtagggggcatgatgctcgggttgcttgtttccctttttgtgtatcggaagccgagagtatatgaggatcgagatatcacggacgtagaaaaatcagcttatacaaaaaagagcttattgttcgcagtgctggctatcttagtatcactcattgtccagctttatttatctcaaagccttggcgtggaaggaatgatcttcggtgcactggcaggccttcttgttctgtttgccacaggcatgatgaaacgagatgaagcggatgcgctgattacttccggtatgaatatgatggcatttatcggctttgtcatgcttgtagcggctggatttgccaacgtattaacgaaaacaggagatattgaacaactagtgaaagcatcttctcagttcattggaaacaatcaaagcgtagcggccattttaatgctattagttggtttacttgtgacaatggggatcggttcatcctttgcgacgattccaatcattacaaccatttttgttccgttatgtatgcacttaggatttagcccactagccaccattgccattattggttcagctgcggctgttggggatgcaggttcacctgcaagtgacagtacgcttggaccgacatctgggttgaatatggatggacagcatcaccacatttggggtacttgtgttccaaccttcgtattttataatgttccgcttgtcctgttcggctggcttgcggcaattattctttaacatgaaagcttgtagagaaaacgttgttttttctataagctttttttgtgatgttttatccatttgttcactttctgaaggtgaaaaataattaggtctaaagtatgaattaaatgaatctttctttctctttcttacgtatatatgctgataaaaatgaaaaggggaagatgagagatgtctttttttaaaaagctagcggcaagtgctgggattggtgcagcgaaagtagatactattttggagaaaaacgcctattatccaggacaagaggtaaggggaaccgtccatgtaaagggagggaaaatctctcaggacatccgctatatcaatgtcaagattcaaacacagtatgtgattgtgaaagatgatgaagagcatagaaaatatgtgaatatctttactttacgggtgacggattcttttaccatccagcctggagaaaagcatgaatttccgttttcatttattcttcctatcgataccccgatgacgatcggaaaagtagaaattgcagtaatgacagaccttgatatccaaggaggaatcgataaatctgactatgaccgcattttcgttgaagcacatccttgggtgagaaatgtactggaggccactagaaatcttggcttccacctgaacgaagcagactgtgaacaagcgccttacttccagcgccgactgccatttgttcaagaatttgagtttattccgacatcagacgactatcgctatatgcttgatgagctagagctgatttttctgatagatgaaggcggcttagacattgtgtttgaagtcgaccgcagagcaagaggcctcagagggtggcttgaggagatgtataacgatggagaacagctggtacgctaccgcttcagtccagcagatcttgaagatgtagaagtgcttgagggaatgctagaaggaatcatcgatcaatacgctgaataaatgatggaaaaagagcctgaatggagacaggctcttttctatgcgacttgtagatgatgtctgcccttatgatgcggcttgttgttttcgaaaggacgtggcttttgaaacagagcgataaattttaggtgcgagcatcgcaagtaatatcgtcaatgcgtaatctttcaccataaaccagatcataaaaaaccacgtggtttgataagaaattggggcattcagccacacatttaatgcgaggtacgtataagtcgttccgatcacatacatgacggtcgtacctgcaatagctgcaagcaaaaagcggccaaagccaggattttttcttttttctaaaatgaatccagctagccaggcagcaggaatatacgataatacaaaaccaccgcttttgcctaaaataaccccaaagcccgctgagaactgtgcgaatacaggtgcaccagcaattccaactaaggcatatacaatcatagccaatgcgccaagccgtctgccgagcaagagaccagcaagtacacaaaaaaacggctgcatcgtaagtggaattccgccgacctgcaaaaacggcacaatggatgtgatattggctccaatcgccatgagtgcagcaaacattccgactagcacaaaatcagcggttcttgttttctgttgcatgatgtttccccctgtcttatctgtacaaatagattaaggggatgagaagtgtttgtcaacctatttttattattggttaacaaaaaaccacccatgaaaagggcgggtctgtattaagcttctgtcatagaagacgcatcgatcgcttgatgaacaggcacataatcatagccgagatcacgagcgacggcttcatatgtgatatgtccgttcatgacattgacaccttctgcgatggctttgttttcttgaatggcttttgcagcgcctttattagcaatttgcagtgcgtagggaacggtgacattcgttaaagcaacagtcgatgtccgtggaacggctccaggcatattggcgacagcataatgtaaaataccgtgtttttcataagtaggctgatcatgtgttgtgatatgatcgattgtttcaacaattccgccttggtcaatcgctacgtctactatgacggaaccaggcttcatttgcttcaccatttcttccgtcacaagcgttggtgctttggcacctgggatcagcaccgcacaaatgagaaggtctgcctcactgactgaatctgcaatgttgacagggttagacattaacgttttcatttgatgaccaaattgatcgtccagctgacgcaagcgttctgcgtttacgtcaataagagtgacatctgcgccaagtccaatcgccattttcgctgcgtttgttccaacaacaccgccgcctataattgtgactttccctcttgatacccctggtacgcctgcgagcaagatgcctttaccgccttttggcttttctaaaaattgtgcaccgatttgagcggccattcttcctgccacttcagacattggtgttaagagagggagtgatgttccgtccgttactgtttcataagcaatagctgtgatgcctttttgttttaaagcttcagccaaggagggctctgcggcaagatgcaggtacgtaaataagatgagtccttctctgaaatatgaatattcctcaggtaatggttcttttaccttcatgatcatatcagaagatgcccacacatctttcgcttgatcaagaatttctgcaccaacagatacataatcgtcatcagtgaatccgcttccaaaaccagcgtttgtttcaattaaaatctgatgtccagctgaaagtaattgagaagctgctcctggtgttaatgccactcggttttcattgttcttaatctctttcggaatgccgatgatcatgtttattcctcccatgcttatctattcatattgtatgtctagtgtatcctgaatgtttaaaaaatgcttcggttgaaataaaaaataaaaaaacgcctctttgtgaaatttcacaaatggacgtttttaagcttcatatcaaggtatatggtcattttctcattcatgttttttaaatctatttctgcaatgtctgtaatacgttttaatctgtaattcaaggtattgatgtggatgtttaattgctttgcggcaatattggcattgctgtcacagtcaataaatcgttcaagggtttcgactaggttggaatgatgcctcaggtcgtaatcttccagctttgataaagagtaactggagtaagatgagccccttcgtttttcagcgaggacatctaaatattgataaataccaagttcagaaaaactgtgtaaacgttcggtttcaacaggaaagcgctcttttgtttttaatacagccagtgcttctttataggaaggctgaatataagagatgttatcgtaaattccaccaatcgctgcttgaacgtgatggatatgataacggtcagacagctgctgcagcatgccgcttgtgaattgtttaatatcgtgcagcgggtgttccgttttgggtgagacaagaataatgaattcgtgaaaatcaacagttgttaacagcacttggacttgctgcgttgtttcaagcaggtaagatagctttttttctgtgtcttctgtgagttcgtcacgaaggcggaaaatgatgatggcatacgtgtctggacatctgatgccaagtcttaaaaataggtctagcatctcatccttttcatgaatatgacctgtgagcatcttccagaaaagctcctgattgcgttcttctgttttcgttttgcgaatttgtaagttaagtaatttgtttttaacagcatgtgctgccatcttcagaaggtccatttcttcttctgaaaaaggctgtgtggactcaatcgcccagataaaaccgagtacttctttgtccttccatattgaaatggcaaccctgctagataaacccacctctgcaatttgagggacacgaagcggttcgtctgttttaaggagtgtaggaatgatgccgtccttccaaagccgattaatgactttttccggtacccggcgggagataatggttgaagttctggcgggatcagtaaaatcattatgtgtgctataagccaacaatcgatgatgcgtatcttctatagtaatagggcaattgagcacatcactaatttggtctgccacatcctctaaacgatcaaggctgtacttaaatggatctgtcttttttgtcataaaaacccctgctttttcgaatatttcacgtacttacattatgaagagaaagaggtacgtaaatcaataacaaaatgccataaatttaaaaaagagatcgctctgagaagcgagcgcatcgatgctaaaagtaggcgaaaaagaaatagtacaataataacgtagtaataaatcaataggcggaaagattcagtgaagtgtgtctacacttattaagaatatatgaccaaaaaaatgttaaatactagataaaaagcgaaaaaacagtaattccatagactcattttgtaaaataaaaacagatttgtttgactgtgtatcatttctgtttttataataataacgtcaaaaaataagtggattagcccattatatggcggctatgcacgggaggtaatgaggaatatgtcaggaattattcgcgtaaccccagaagaactaagagcgaccgctaagcaatatggtgttgaaagtcaagaagtgttaaaccaagttgatcgtctaaatagaatgatctctgatttaaaaggaatgtgggaaggtgcttctagtgaagcatttgctgatcaatacgagcagttaaagccttcattcatcaaaatgtctgatctattaacagatgtcagcaatcagcttgatcaaacggcaaatacacttgaaagcactgaccaagacatcgcaagccaaatccgcggctaatcaaagggatttcctttctaagtgtgaaaagcagaaaaagcgccgagtgtgtcaatggatgccggcgctctttctattttgtgaggtggaaatttgtgtatatcgatattaccatcgacttaaaaaattatgatggcagtgtgtttgatttgagactatcaaattatttacatattaaacaagtcatccatatcgcctggcaggcaaaacaaatctcacttcctaagcgagaaggcggctgggtgcgagtagtcaataagaaagctgtgttttcaggcgaatataagctgtcagactgtggaatcaccacaggagacaggctggaaatactatgaaaggacttttgtaaatggcagataaaaagagttcctatttagaagaacaattagaagcagttatgaaaaaagagggtggcacctacagcttcatttttcaaagagagacaattaaactcttagacggtttagaagcggcaccgatcaaagacatcaatccttcattcaaaaaagagattcaattaactgaagatgaggtcatcatttctattcaaccgcctcctgcctatcaggaatttcgtttcatccatgcaaaggatgaaaaaagcaaatggattttttcataccagcttgtcgatgcagtttgcaaacacgacgtgaagcggctgcatcctattgtttctcctgaaaacattgtttttcatcaaggcttagctcctgcatttttgcattacggggtcaaagaaagcatcccgccatatgaaacggatgaacatcgtttattaaaagaagtcaaagccgtcattcttcgagtggtggaccatgaatatcagtttcaagaatatgtggcttacagcgaaacgctgaaactatctgaactggcaaaagagatcagcgaaacgcagtctttggaagaattgtctgccctcactcagcaaaaaatcgaagcgattgaaacgaaagagaaaacgctattaaccattccgaaaaagaaatggaagatcgaacgatatatcggactaggtctgcttgtcctattaatcccggcattggtgtacaccatttacaccttcttttttgcgatgccgaaacaagaagcgtatgtcgaggcaaacaaatattatctcaacaaacagtacagccaagtggtggatacgttagaaaaatattcagccaatcaaatgccggtctctcttcaatatgaactggccatttcgtatgtacaaacgaatcaaggcaacctgttactcgatcagcataaaaaagaaatcacagatacatacacattacagactgatccgcaatatttccttttctggattcatattggacaaggcaatagcaaggaagcacttgatattgcacgtgtacttggagacgaccggtacatattcacggcactcgtcgcctaccgcaatgacattcaaaacgatgacagtcttactgcagaagaaaaacaaaaacagctagacccgattattaaggaaatggcgaaatatgaagaaaaagaaacaacggagacaagcaccaacgactcctcgggtgcaagccaaacagatgaaacagctgaacaaaaagagcagtcaaaagccgatcaagagaaaaaagagaaagaatctgaagcgaaaaagaaaacctctcagacgaaaaaagatgagaaaaaataattctttcgatacaactgacagttgctgctgtcccatgaggaggtggagcgtttgagtcttctttgggttttttatgaggaggattatcaaaccgtccgtttagacgagcagttcaatcgagaagctgtgattggacctgaaatagagcatacggtgacaatccctacactttcgtttgatgaaggggtcatccgtttatctcccgatgaaccgaatgatggctttttcatttatcagggtgaagggaagaaaggcacattacttctacatgaaccatataaacttggatcacttacacttatgttaatggaagcacaatatgaccaacacatttattacctaggaaatagagtcgagctgtctttttcacgtgaggaaaaagatggtattgatgtgtggaaagaacaagcgcattccatgtttcaagatgcgagccagtttactttggagaaaatcgaaggaacttggtatgtcatgcctcaggacgagacgatttatgtgaacgggaaaaaaatccatggtccagagaaggtttatactggagatgaactgttctggaactttctaacggtgacattgaaagatgatgatttattgcaggtgactgcatatgaaccatttcaaacacgtttggaaaaaacaaaagcaccaagcacagaaacaaaacaaaaatatcctttatatagacgaacacctcgtttaatttatgacctgccagatgaccgggtatcctttagctttccttcgcaggagagtgaaaataacagcagagggctttggcttgttgtccttccgccgcttgtgatgctccttgtgatgggaattgtcgctcttgtccagccgcgcgggatctttattgtcgtgtcgatggcgatgtttatcatgaccttaatcacatcgtccgttcaatactttaaagagaaatcacaacgcaaaagacgggaagagaaacggcagcgagtctattctctatacttagaaaataaacgaaaagagctgcaagagctctacgaccgccagcaatatattttgacgtatcattatccgtcatttgaacaaatgaagtacttaacgtcagaaattagcggccggatttgggaaaaaacacttgtgagtgacgatttcttgcagctgcgtcttgggacgggtgcagtcccatcaagctatgaattatcgatgagcggtggcgatatggccaatcgtgacatggatgacttaatggaacaaacgcagcacatgcaacaggtctatcgtgaagtgaaggatgtacccattacatttggtcttgcagatggcccaacaggcttgattggaaagccagccattgtgaaaaaggagcttcatcaacttgtcggacagcttgctttctcgcacagctatcacgatttgagatttgtctttatttttcatgagcaggagtatgagaattgggaatggatgaaatggcttccgcatttccagctgcctcatacatacggcaaagggtttatttacaacgaacaaacacgcgatcagctgttgtcctcgatttatgaaattttacgtgagcgtgatttagaagaagaaaaagagaaaaaaatctttacgcctcactttgtgtttatcgtgacaaatcacgagcttattgctgaacatgtgattttagaatatttagaaggcagccggactgaccttggcatctcaattatctttgctgctgaaacaaaggaaagcttagctgaaaatatctcgacgcttgtccgttatattaacgaagaagaaggagatattctcattcagcacaagaaagccgtccgaattccatttcagcttgatacacatgagcgcggggacaatgagctgtttgccagaacactgagaacattagatcatcaagttggaatgaccaactcgattcctgaaacggtctccttccttgatctttttcatgccaaacaggtagacgacattggcattcgtgaaaaatggctcacatcggaaacggccaaatcactatctgtgccaatcggttataaagggaaaaatgacattgtggatctgaatctgcatgaaaaagcacacggtccgcacggcctgttggcgggaacaacaggatcagggaaaagtgaatttttacagacgtacattttatcgctcgctgtacactttcatccacatgaagtcgctttcctattgattgactataaaggaggcggaatggcgcagccgttccgaaatattcctcatttacttggcaccatcaccaatattgaaggcagcaaaaactttagtgaaagagcgcttgcctcaattaaaagtgaattgaagaaaagacaacggttgtttgatcaatatcatgtgaatcacatcaatgattatacgaagctctataaggagaaaaaggctgaacaggcaatgcctcatttattcttaatctctgatgagtttgctgaattaaaaagtgaagagccggactttatcagggagcttgtcagtgctgcacgtatcggccgaagcctcggggtccatctcattttggctacacaaaagccaggcggagtcatcgatgatcaaatttggagtaactcccgctttaaggtggcactaaaagtacaagatgcgtcagacagtaaggaaattttgaaaaatagtgatgcggcgtccattaccgttacaggccgcggctacttacaagtggggaacaatgaaatttatgaattgttccaatcagcttggagcggtgcgccttatatggaagatggctacggatcagaagatgacattgccattgtgacagatactggactcattccgttatcaggggtaagcacagagccggcagtgaagaaagagacagtatcggagatttctgctgttgtggatgaaattgaacgtatgcagcaggagcttgggattgagaagctcccaagtccatggcttccaccgcttgaagaacggattccaaaatcacgttatgcgtcgagtgaagagcatgtcttccattttgcgcttgtcgatgagccagatcagcaaagccagcatccactttcttatcaaatgatggaagatgggaacattggaatcttcggttcctccggctacggcaaatcacttgctgcgacaacactgctcatgagttttgcggagagatattcacctgaagaatggcatgcgtatatttatgacttcggaaacgggacattgcttccgttagccaagctaccgcacacggcggattatttcttaatggatcaaatgagaaagattcaaaagtcgatgacgcgtctgcgggaagaggttgaataccgcaaacggttgttcaggcagcaagaaatgagtcatatcaaaatgtacaacgccttaaatgagaaaaagctcccgttcattttcatcgtgatcgacaactttgacattgtcaaagacgaaatgcatgaacttgaatctgaatttatccagctgagccgtgatggacaatcattaggaatttacttcttgattacagcgactcgggtaaacgcagtccgccaatctcttatgaacaacttgaaaacaaaggttgtccattatttaatggatcaaggagaggcgtattcgattattggcagaccgaaattcagcttagaaccgattccaggacgagtcattatcaacaaagaagagctttactttgcgcaaatgttcctgccagttgaaggagagaacgatctcgaactgtttgagcatttgaaagaagagatacagtttcttcatgatcgctttgaaacagctgaaaaaccaaagcctgtgccaatgcttcctgataaactgaccatttgggagctagagagtcgtttagaagaacaaaaacagccgtatgacattccagtcggactagatgaggaatctgttgcacctgtttactttgacttgaaaaagaataaacactgcctcatcatcggtcaaacgcagcgagggaaaacaaatgtgacaaaactgatgcttgatcagcttttagcagcaaaacctgagaaactggccgtgtttgattcgattgatcggggtctttcccattatgcaaaggaagagaatatcgattaccttgaaacaaaggatgatattaccgaatgggcagaggaaatagaccgtttattcaaggtgcgggaagagatgtacgtcgaagctgtacgcaggggagagaccgatcagttgtcgttccctcaaattgtgcttgtgattgatggcattacgcgttttcagcagacgatcgatccgcgtcttcaagatcaattggctgatttcatgaagtcatatgcacacctaggctttagcctgatcgcatcagggaatcataccgaattcagtaaaggctatgatgcactcacaaacgaaatcaaacaagttcgtcatgccatgttactcatgaaaaaatcagagcaaaacatcataccgcttccatatgcaagacaagaaccagatattcagccagggttcgggtatttggttgaaaacgggaaagagaagaaaatccaggttcctttatgtgcggtagaaaggaagagtgttcaatgacagagcagcaaaaaagctccatcaaaatcgtatcgaccatgatattgattcttgttctgccggttttatttttccacctcattggagatgacccggcaaaacagaaaaagaatgccacacgtaatattgctgtggtcaatgaagatatgggagcgagcgaaagtgaaaacaccgctcgtttcggacaggatgtcgtggcagcattatcagagcgtccagattatacatggaccgtagtgaatcgcagtgcggcggaaaatggactgaaaaacagaaagtatgacgctgtcctctatattccgtctgatttctctaaaaatgtgctcagctatgataaagaccaccctgaaaaggcatccattcaattttctattcaagaccagctcaattcagtcaataaagagaaagtgcaaagagagctggaaaatgcgcaaaagaaaatgaatgaacagatgtcgacgttatactggagttttgtatcacaggaaatcggcaatgtcagagaagagtttgagcatattgtcggcaaagaagtcgaattccaaaacacgatgtataacttctataagccgaactcaaacaaattatcagatgccgttcagcagcagaagaaacaaatagaagaattaaaaaatgcgatgaccgattcacagaaacagtataaagacggtttgagtacaacagaagaagcaaagaaccagttaaaggactttgtgaaagcagtcgatcaataccagcagtatcaagacaaacaaaaggacctcttgatcaaagcgcaatcgacaagtcaaaaacaaatccagcaagggctcaaacagcttgctgatattcaaaaccaaaatgcccgcagctttagtgatcaaatgggcggactaaaaacagacatcaacggggtacaaagtcagctgaacacaactgacagcgccattcaatctgttcaaaagtcaagagaggacgccattcctaagcaagcaacgggattaacggatcttgtgatggcgtctcaagaagaactgattaaaaagtatgaagatcgttacttaaaagactatcgaaataagatatcagccttgcaaacgaagctattggctaaacggcaagagttgatggatgagcctgagcgtccagttgactctgatgatgacgggccatcagatcaagataatgaaaaaccagaagagattgggattaacctagatgaagaaacaaatgagctctcgcaaatttcaacagaaatgaacaaccttgcagatgaattaggagaacaggagacgccgccttctactgaagatggcaaagaaggtgaaggcgatgaaaatcctgctcagccagataccggcagcacgaattcatctcaggatgaccttaaagcactctctactcgtttagaagaagtgaaaaagaaaattcaagaaaaagctaccgctcataatgacgaattgaaagataaagtgagtcaaatgagtaaagagcttgagagccttacgaaaaaagtagaaaagcttgaaaagatgttcctatggttacaagatcgatataatgtgattccaaatgaaatcaaaaatcaggaatcctctattttaagcaaagtaaaagagctgaagcgcagaaactcaccaattggtggagcctttgctgatgatctttttgaggaaaagtttgatacaaaatcaacagacactaaaaaattaatggactattccaatcaactctcccagctagagctgatgattgcaaatgtctatcaaccatctaataactcttctctactagacacaaaagaagagaaaatccagtccatcctctccatcaaaaaagaggaaacagaaaactgggatacgctcaaaaaccagatgctgacgtcaaacgatgatgtgtctacttttattgatgagatgcagaagttttcagatggctatgcagaatacatttcgactcagcaggcaagcatggaacaggaattaaatacaatctctgaaagtgcggacaatgttgcggagcaaatggctgatcaaggagatgcagtgtatacggcagaccttgcaggcagttcaattgttgtcagtgcacaggattcaattggtcaggaagtgcttcgtctttctgaaaatatgagttcgttaaccgaccgccaaaaaggggtggcggattatacgaataacattgaagagagtgtgacaacagttcaagaaaaagcggatacgctgaatgaaaactggagcaagaatgtcaactctacgaagcttgttcagcaagatttgaaaggtattttaggaaacacattgagtgatcaaggcaacagcaactatgtgtataaccacttagccaatccgctgaaaatcagcggtgatgtgccagaagaaaaaacgcagacggtaccgccagtggtcattttggtcattgtgatgatcagtagtttgttaattggctttttcagctcgtattatgcggcagctccgatgctggtgaaaggtgcactgtttggcatcttaaatctattagtcggactcatgatcagcttgtttggactgaacatttacaagcttgcagatgatcaagcgattcagtggtccattttcacgattttactattagtggcttgttccgcctttattcgcacggcgttccttttcggctctattgccggatggatggcagcaacggcgcttattttcttctttgtcgcaccattaattgatttggtgatgccgaatttctatttcacaaatccagtgacagacgtgtacctatccatccaatatggaaatggagatcactttggaatgggtgttataggattagtgattttaactgtcctcttcatggccatcccgcttgtgacaaagctatggaaagataaaacggaggaacgtgatgtgactcatgaggcttaatctgttcgtgaaaggggtggcacttggtgtcatgtccctttttctcctcattcctgctgctttcgctgctggtgaagatacggatacaaatgtcaagccgaatgaatatcaggaaaaagaactcaatattaactcaagtatattgagggatcaaacgaaatacgaacaaagcaaaaagacatcaacagtcaaaacagacattcattttgctgaaccgcctaaaactccgggagggtctctttctccgcagcttttcagtgatctaaaagagaacccgcccaaaacatcagctcacatgatggaagagatgaatatctcttttcgtgatgccgctgtatcagcaccttctggcgatgatcacaagaagcagacatcagcactgcttcccatcatctttggtttcttaatcgtctttggcattgtcgtgatgttcattctgattcctaaggtgaatgtgaaggctgaaaagaaatagcctgtctctttgaaaagaggcaggcttttcttatgcagattgcttgatgtcataccgttccactacgtaaaatagtgttatcaagggaggagattgtcattcgaatttcaatcgttacaggcggatcaaaaggatttggtctagcacttgtgaaccggctgctttcacgcggggaccatgtgtatacggcagcaagaagtgcatcgccgatttaccatccggagctcacacatacacaggtcgacctgacagatgagaaagcagcagccaaatggcttcaagatagtctcacgccgcaaacactggcagctgctgatgacatcttattcgtcaataatgcaggcatggtgacacctatcaaacgtgtggggcaaggcggacaggatacgcttcatcagcattatacgttgaatcttgtcatccctgttttgctgagccatgtttttaccaagcagactcaatcatatagcggaaagaaaacgatcgttcacctttcttctggagcggcgaaaaacccttataaaggctggagtgcgtattgcagctcaaaggcaggacttgatatgtttatgaggactttgcatgaggaacagcaggacgaggcgtatccaatcaacacgttttcattttcccctggcaccattgatacagatatgcagggggagattcggaagtcatcaaaacaggacttcgaacaaattgaccgttttcagcaattatatgaaacaggcacgctgaagagtccagatgaagtcgcaggtattttgctcgatcttttagcggatgatccagctggcggatgcgtatacgatgcacgtgagtatgtgaaaaagcagtcataacgactgcttttttcgtcttgtacaagcaaaaccagctgatttgacataagctaatcttgagactcatagaaaatataacagaacatttgagtttcttttcagaatatgttaggatgctaaaaatatagataaggaggggtttccatgagaaaggttacattaatggatgtttacacccatccagttgctcaaaagtatttaaatcgttcaggaaaagcccatgcgattgcttgtgcttatcacgcattcaagctggcgatgcaggcgggaattaacccagatctggctgtgaaagcagcactcttgcatgatatcggccactatgaatggtatacagccggcggagaatgggattacgagacatatagaagaaatgacattcatgccattaaaggtgcagagcgggcacacaaactgctcatacggctcggggaggaaccaaaagcagccaaagatattgcacttgcgattctgcttcatacggattcatatttgccagagggcgacctccataaggacacactccagcaaattgtgaagaaagcagatgaaatggatgaagagcctggcggacaccaccattacagacaaatagacgaatcattggcaatgaaaaagattgccgatttggatcagaaagtgcagcaggcactccagcccatgaaacgctctgtttagtatggaatatctccatgaatcgttccgtgctgatcgacatacaacgtgcgaataacggtacggttaaacgcagatgttcctgacgtagtgagtccggtgtaatgcaccgtgacggaataagcaccttcttttttcaattgaatggctgatgaggtacttgttttcagtggatgatccttttgtgcatctttaaagtaattggtttccactgatttgcttaaccgtttaatcagaccgcttgaatgggtcgatgcatcccctgacttcgatgcagctgctttaatttcttcatttaatggtgaatcaaaggatacaagcagcagataaggagcctttttgcctgaattcgatcgaatcgtccattttccaggaacgggcttattgatttgcacatggtgtgaatatgcgccttcatatgggaaagatgcttccgatgtcttaaggtttgttaagacgtctccatttggggcgatgatttctggccgcgtctcctgcctttcatttaaccactgaatcgataagccattcgttccttcctctacatagaacgcttctgttttatccttttcactttctccacctttcacataaacatctgtattcagctcagcagaaacgggctcttgttcctctttattttcattttcagcgcttgcgacatttgccagaagctgatgctggaacacaggaaacatacttgtgccgtttttgattgaatgatgatcccattttcctgttaaaatattgtttgcatacgatagtcttgtgctgtttaccgtgacggcgccatcatttgcaccaaagctctttaaatacatgccgcctaaatacagcacaccgccaaatgttccccattccgagccagagtaggtgacatatttattgggaaacgcctccagctggtcggtttcacttcgaaaagccgccatcagaccggtttgcaaagaataaagcgcgtcgcttttttgtccaagaatttgcgcgagccagcttccgcccttgctatacgctagatccgcaagcggtgtcccgttatgaggagagccgagagtaatgaccttttccacatagggatgtgctttgaaatacaccagtgcggactgtgtatcgaccccgcctttactatgaccaatcacaatgagttttctaccaaacgcatcatagatttctttgagcttttctgctaatagtttgccgttctttttcatgtcctgatctggatgcaaatctatgaatgcgctttcgtatccgttcagaacagcctgctttgccatatcgtttcgatcggaccaagtggaggaggagctgttaatgccatgaacaaaaacaagtggtggttttgactcgtctttttgaacgggctcttctcctttaaaccacttccccggcgtcccaggtggatctccaattgtgcctgcatacgcataacttgcagaggatagaaagagcatgacagcaacaatacagatgagttttttcaagacaattcacctcttcgaatgatttaaattgttggcagcaccaatctattatacttcttaaaaatgtaaaaacgtactatttgtaaaaatatggtattaatgttgtgggtttgccctgagtgacattcacatgggttcatgcatacgctgtgggtaaatacacaagtaaaggggcaggtaggatggcacaacaaggaagtccacagcttgtttcattagttgatccatatgtttatcaaacattgcagaaagtggtcggtatgagattaattgtgcaaacagtgaaagatacggtgcgtgggaaattgaaggaagttatgccggatcatattgtgattgaagcgggggcgaaatcagttttttatgtgcggatccagcaaatcgtgtcggtgatgcctgatcacagtgaaagagtgtaacaagcagacgcatagatgtctgcttttttttcatgcttatagaatgtatatctggaaaaagtgcatgatataccaattgttctttttttttcaaaaaatgaggttctaaaacaagaagcagttgacagaaggtgggttgaatagtagttttttaataagatcaatacgtaacaggaggagcatctttgttaaaatctaaagttcatttttggacattccaaatattacttgttttactcattgtctatgtatcaactaaggtttcgtttttatttcaaccgattattttatttgcatcaacactgtttgtccccatcttgctggcgggtattctctttttcatctttaatccaattgttcgatttttgtccaagaaaattcctaggacactcgctatcctgatcatttatctcttgttcattggactcatcacgttcatcgtcaatgctgctggaccggtgattgtctcgcaggtcggtggacttgtcaaaagcttccctggttatgtgacggacatgcagaagtttatcaatgacttttcgcattctaaaacatttacttggatgatgaaccaagattatgtgtctgtctcaaaatttgaacagacgatcgtttcgacattaaaagatttgccggaaaatatcgcttcaagtatgtctgctgtgtttggcgtgattgccaatatcgccttagccgttatcacagttccgttcattttgttttatatgctgaaagacgggcataagtttccggacaagctcgttcaatttttgccaatgccttaccgtaaggaaggattgaagatttttaaagaattaaacgacacacttgcggcttacatacaggggcagattgttgtctgtttatttgttggagtggcttgttttatcggatacttattaattggtgtgaaatatgcgcttattcttggcattatcattgcggtcacaaatgtgattccgtaccttggaccatatcttggcgcggcaccagctgtgctgattgcctttcttgattcgcctggaaaagcagtggtgacagtgattgtgattcttgtcgttcagcaaattgacggaaatgtcatttctccattgatcattgggaaacgccttaacacacaccctttgaccattatcctgctgttaattggggcaggaagctttggcggcatccttggcatgatctttgcggttcctgtctatgcactgctcaaagcgatcaccttgaatattgtcagattggttcagctgcgtcagcggtctcgtaaagaacagcatttaaacgtatagggcagatgcacaacttttccctttttgcataagatggttgacataagcagatagggggagattctgatgcctgcaatcgttggacctattcatatcgagtcattaggaggaaacggtgcagctactttcggtgatgtactggccattgcccctttggctgtaaaccactccactggcggggcgggagcctttaattcaggtgattatatgtctcttacaagtgatcctaatgcgacgatgctttgggacttcacattgtttgaccagcctcaatcatttaatgcatagaaagacagctggtgatcaaatatcagctgtctttttttatttgtgatacacgtattgttgagctgggcaaatgatgtggatagaaaaggtggtggacaatgccagcgattgttggacctattcatatagatcgtgtgtacggaaatggggcggcacatttcggcggtgtttttcccatttcgccaaaaagtgttgattactccgccggtggttcaggtacctatcatgcaggggacctcgtccaattttttaacagtccaaacgtcacatttgtttgggatttaaatcttattagtcagcaaaagagcttcaatgcgtagccagctttgaaagggatttccttttcagaagctgtctttttttatggtacaatggatatggatgtaagaagaaaaaagaggtgtgaacagagtcaaatgaaaattagaaaagcacacatcacaagccggcaaccaaagacctacaatgtatatttacatgaaaataaaaaagaatataaaacgcttgttgccgtacctgacattgaatggagtatatccattgcgtacgaggacgaaaaagagcagctgatccatacgctcgagcaatccttaatggaaagagcagaaacagacgaagcccgtgagcttgcactaaagattgtgcactgggtcacagaaatgtaaattttaaaaccaggagtgaaaacagcgatgaaagaagaatccgtagacttttatttgcagcaaggaatatttggacatgctgaaacaaaacccgatgaacgaagaatgtttctcggttcattaagggaacgagcgcttctcgccctgacaaagggacaggtattacgaaataaaccgtatcaagaggtcgaacaagtattaaagtccaaccgtcaggccactgttcttttaaatggtgagttgtcctatgcatcttattctcaatatgtgaaaatggctaatgccgctggatgttcctttaaagtggtgaatcattatgaggcgcattctccttttggtcttgtgatagagctatcaaatgcggtcaatcaagagcacatctatatagaagatgagctgtttcagaaggctttttctcacgaatctgttgaataggtttccctagtgaaatgaataggctataatgagtcaaaagagcatatgggagagatgcggatgggcaaagcattggtttgtattgattataccgttgattttgttgcagacgatggaaaattgacatgcggaaagcctggacagacgattgagcctaagatcacagagatcacttcttcgtttattgatgaaggacactttgtcgtctttgcagtcgatcatcatgaagagcaagacccttatcatccagagacaaagttatttccgccccataatattcgcgggacaaagggaattgaactttatggcaaactaagttcactatttcacacgtcaaaacatttaaaacatgtctactatatggaaaaaacaagatactctgcttttgcaggcactcaattagaaatgaaactgcgcgaacgcggcatcactgaacttcatttagccggcgtatgtaccgatatttgtgtacttcatacagctgttgatgcgtacaataaaggcttcgaacttgtgattcaccagaatgctgtagcgagttttaatgaagcggggcacgagtgggcactttctcactttgagcagtcgcttggtgcgaaagtggttaagtaagggaaggagaatggaagttggagcatcggtttattgacgacagtttatcactacatacagatctttatcaaattaacatggcagaaacgtattggagagacggcattcatgagaagaaggcagtttttgaactcttcttcagaaagcttccatttgacaatggcttcgctgtatttgctggtttagagaaagcgattgaatatttatcggacttctccttcaccgaaagtgatctagcgtatttaaaagatgaactcggttataaaagcgatttcattgattatttaagcgggttgtcctttacaggaacacttcattcaatgcgtgaaggcgaaattgtctttgcaaatgaaccgattatgcgcatcgaggcaacgcttgtagaagcgcagctaatcgaaacagccttgctgaatatcgtgaatttccaaacactgatcgcaacaaaggcggctcggattaaaggaatcattgaagatgagacagcactagaattcggaacaagacgtgcgcatgaaatggatgcagcgatgtggggagcaagagcggcactcatcggcggcttccaggcgacaagtaatgttcgtgctgggaagcgcttcaacattccagtgtcaggaactcatgcccatgcgcttgtacaagcataccgcgatgaatatacggcatttaaaaaatatgctgaaacccatacagactgtgtctttttagtcgatacgtatgataccgtgagatccggtattccgaatgccattaaggtagcgaaagaattcggagacaaaatcaactttattggtgtcagacttgatagcggtgaccttgcatacttgtctaaaaaagctagaacgatgctggatgatgcaggattccatgatgcaaaagtcattgcatcgagcgatcttgatgaacataccatcatgaatttaaaagcacagggtgccaaaattgatgtgtggggtgttgggacaaagctgatcacagcatttgatcagccagctcttggtgcagtgtataaactcgtatctattgaagaaaatggaaaaatgaacgataccattaaaatttcgtctaacccagagaaagtgacaacaccaggacgtaaacgtgtgtaccgcatcatcaatcaattgaatcatcattctgagggtgactacattgcgctcgaagaggaagatgttcatagtgaggataaactgaaaatgttccaccctgtgcatacatttatcagcaaatttgtcacaaactttgtggctaaggatcttcatgtccctattttcgaacaaggaaaacttgtatatgacaatccggatattcaaacgattcaagcctatgtgcaggatagcctcggacttttctgggaggaatataaacgaatcagcaaaccagaagaatacccagtcgatttgagtcaaaaatgctgggataacaagatgcagtttatccatgacgtgaaaaataaaattaaaaaagagctttatgaaagctaattggaagaaaaggagatcatcaagccgggtgatctctttttttattttttgaccgattcaaagtgaacaataagcacaatcatttggtatactgaaagcacatcttgtttgtcattgcataaaggaggattggagcagttgagggtgtttgttgcgagacagcctatttttaacagaaaagaacaagtcgtatcatatgagctgctttatagagatagtgaaaccaatacatatagcgctgaagacggtgaccaagcgacaacggacctcattataaatagctttttaaatataggtatcgaaacattgacagaaggcaaacgatgctacattaatttcaccgaaagcttactttcgtctgatctgctcacctattttgatccgcatcagcttgtgatcgagatattagaaaatgtaccgattaccccggcacttattatgagatgtaagcagttaaaaaaatggggatatacgattgcacttgatgatttttttctaaacggaacacattttagtgacaagttgcttgacgaactcctctattgcattgatattttaaaaattgactttctgaagaccaattcggaagaacgaagaaatattctacatacgtataaaaaatatcgacttcgcttccttgcagaaaaggtggaaacgcgaagagagtatgaagaagcgctagaagccggcttccatttgtttcaagggtatttctttagcgagcctcgtgtcatatcaggacgagcattatcgaccagcttccatgcgtaccaccagctcttaaatgagctgagcaaggaacagccgaatatccaggtcgtgacccattttattgaaagtgacctttcgctgtcatatcaattattaaaaatgctgaattcaggcggcatgagacgtctttatcaaatcaaaagtatccggcaggcgattatcctgcttgggtttaatgaaattcggcgctggatctttattctttcatttaaagaactgaatgtccaagccaactcaagccaaaaagaaattatcaaaatgtcattcattcgggcgaaaacgtgtgaactgattgcgagtcgtactgaacgagagcacccagcctcttatatgctgacaggtatgttttctctcattgatacgcttgtcagggcagatattacagaacttgtgaaagagctgccgctttctgatgaagttggtgaggcattgcttggctatgaaaatgattattcatttgtgctagatgtagccaaacggattgaacgaaatgaatgggatgatgagatgttaaatggggaactcccgaagcaagaagcctacggctgttatatagaagccattgaatggtgtcataaaatgtttgaatcttaagaaaagccgctcacgtcagagcggctttttttgttatgcccactgtaaaagaagaaaaagtctgctagaggcgagagacaagtagatacgaatgccttctggactaaagcggatgtcaatgccactttttacaccgatttgcttcagcatccggatgacacttgtcgaatcagagcgctcagcagcctccatgatgcgctgtgcaaatgaaagcgagctggaaatctgttgtgtaatgagtgaagcatcagcaacaagtcgggctgattcttttgcggctcgttgaaacgagtgggcatctactggaggaaaagtcataggtgtgcgcgggtatgcatggctcattgcggggacctgcaaagcaggataaggaacatagtaaaacatatggtcacctcttctctcattgacgtgaaattggacggatatctgttctaaatgtatgtagaaaatcagaataaagaatcaaaatgatctttctatctttataaatccaacataaaaataggtacttttgcggtcaatttcggtgaatgtcgccaaaaaattgcggtgtccacaatagggtctgtcgtctgacctataacacgcaaaaccgaggatatggaagggatcatacgttctgatgtgagaaaagtgtgacgaatgatgcctgttcttgtcgcaaaaatgacgcagttcctttgaaattgagataaaagtatgatttgaaaagtcagaaaatggtgaaaaaagacctattgaattttgcggtatcacgcacacattttgtgcatacttttcggtgaaaaaatactcaattacatttacactgttagtaacagatcaaatacttatgacccaatcaccatacacaaatacattgatcttccaaaaaaggagagtggaatcgatggaaaagtatgaaatcgaagaacttaaacaattattatggaaacttgaaaacgaaattagagaaacaacggcttctcttcataacattaacaaaagcattgatcaatacgacaaatatgaatatgtgaaaatttcttaaagacttgataatcatcaagtcttttttttatccaaatacatacaaaaaaaggatatattattatataattgttaaatagtgatgtcagtggacatttgctcatgtctttttagtaaaataaaaggcggaagggtgaggtacaagaccgagtatgctaaactatctagagaatacaaaaatcaagcagaatatgtctgattttattcaacatgcagtcaggcagaaggatttacaacaactgcttctagaatttacagatagaaagaatgaatttccctttgggcaattggcttacaagcattatgaggcatttggcggacaagacaagcaagcgattacacaattgtcagcagggattgaacttctcatcttatcagccgatatattagatgatattgaagatcaggacaatgattcgtatccttggatgaacgtcgaccaaggagtggccatcaatgcttctacgtatttgtatacgctgagtatccaattcattacatcaataggtgaaaatgattctcaactaatagagaaactgttccatttcatcaaaatgtcaatggaaggacaacatgaggatttgcgtcatatgcatggaacagaagaagagtgtgtagaggtgttaaggaaaaaatcaggatcattaacagctctttctagtgtactgggtgtttatttagcgacgagaaaaatcaactcaactgtggaatcatattcaatatgttatggtgttgctgaacagatcagtaacgatttttttgcgttattttcgaaaacaaacggagattttctaaaaaaacaaacgctggcatttagctatttacaaagaggttttaacgatgccagtcaagagcttcttacgttcttttccggtcgtttagatgagtcagaacaaaagtcatttcagctgaagcagaaattacttgaagctggtttgactcagtacatggtatcaatgagagagattatgctgttaaaaatgaggcaagggattgaacaacttgatttacctaaaacaaataaggaacaattgtatgcatttatgacaaaggagggcaatgattgaacattcaaaatatcattgcatatctaataaaaaacccaggtgtggtcgatgaattgatatctggaaatgcaagcttaattcatgctgacgcacaaacaactgcagccattatacagggggtaaaaaaagaatacatgaatgcaaaatacatctgggagtattaatttaaagttcaaacctgtatgatgatttaatgatctttcttaaggatgttttaaaaatgaagcttacctatacaaaattgtccaggtttcttgtatttttatcttttttatttgtgatctatatttcatatatctatgtatttgatatttttaatggtgcacgtgtagaaaagaatgaaaacggtcaaacggaagttgttgacgttgaatatctttctttagcttattcgtcggggttaaaagaaggagatattatactaaagataaacggacaatctaatttaattcaagaccacatgatcaatggtaagcttagaaatgtacaaagaattgatatacaaagaggcaaccaaatcatatcacttaaaaataagacgttgattggtcgcgaaagcttatttgtctatttaatccctcttcttctatattcaatatgcttattctgtatcttttttattattaaaattaacaaagaaccgcaacgaaaatctgcatttttattaattttattcttattgtcaatttgtattgggtatctgagtgcaggtacgtcaggaattggtgatagatttagccattatgttctcttattgtgtttatcaagtgtgtctatcttatatattcattttatctatcaatatttcaaggaatttgatgtgcatttaacgaatccaaagctcatcaggtacttatatttgatccctatttttaaccttgccgtacatagcggggtttcggtgtcatctgaattgagaaaatatgttcctagtatcagtttgctgttttttttcggaacagttttagtagctctttatttaatagtcagaggaatgaagaaatataaaaaaacagcacatggttcagttttaaagttttttgccattatgaatgttttgtcgttcagtccattcattctcttttttgttattccctatgtgttttttgataagtatttgattgatccttttattctgacatcaatcgttttgttaattcctttttctctcgtctaccaattcatgacgaacaaactttacaatatggattttttgattagcagactgaggtactatggctttctagccatcacaccgaccatttttgttgttgtcacgttttatattctgcaaaaaccagaagatttgaagtacacactgaagctcgcattaatcacctacgcgctcatgctggctgttttctatttcaaagaaattctagatttccgttttcgtctgaagcgtttttcagagaagcataattaccaggacagcgtgtttaaatttacgcagctcattcgtgaggcgtcatcacttcatcaagtgctgtatcatttgaaatacaccattttagaagtgcttgttgttaataaagcctttgtgcttgaagtgaagccagatgggcagattgaagagattgatgaatcttcaggtgatagcaatctatggaaagagtatgtggatcaatttcaggatattttaggggaagtcgggaaaatcattgagcttgataaagggtttatgatgaaaattggcgagcggggcggtcactcgtttatgatttgctgtttatccaatttacagacaccgaaattgacgcgtgatgagatttcttggctgaaaacattggctttttacacaagtgtcagtttagaaaatgtcgtcaagatcgaagaattgatggagcatcttgaagatttgaagcagcgtgaagcgaaccctgcttggctgaaaaaagtcatgtttgcgatggaagaaaagcagcgctccgatttagcgagggatcttcatgattccgtgctgcaggatttgatatcgctgaaaagacagtcagagatgtttttaacgaatttccaaaacgatcaatgcccaacgtctattgaacaatcgcttatttcatggaatgaacaaatgtctaaggtgattcaaaccacgagagaaacatgtcatgaacttcggccgcagctgctgtacgatttaggtttagtcaaggcgatgtcgaagctgacttctcaaatccaggaggaagcaccgtttcatatccggctgaatacgactcgctttgataaggagctggacattgatattgactcccagctcaatatttaccggattgttcaggagctgttatccaatgccttgaaacattctcaagccagccaagtgcttgtgatgctgatttgtattaaagatcaggttgttcttcactacgaggatgatggagtcggttttgatgcaagccatcttgatcagcacaccatgagcatgggcctctcgggaatcagagaacgagtcaaggcgttaaatgggaagcttcacattcacacagccccagaaaaagggctgaaggtgaaaattgaaatggaattgtaacgatttattaaggaataagacttggcatctgccaagtcttttatataaaatggaagtgagtgatttaaagggaggaagacatgaagaagatattggtcattgatgatcatccggctgtcatggaagggacaaaaagcatattagaatcagatcagcagctatcagtcgattgtttaagtcctgatgcagaagccgcctttttaaagacgcatgacttttccatctatgatgtgattttgatggatttaaatctcggggatatcaatggaatggacattgcgaaacaaattctagaaaccaaccaactagtgaaaattatcatttatacagggtatgaagtagatgattattttgaagaggccattcgggctggattgcacggtgcaattagtaaaacagagacaaaagacaaaattattgaatacatacaccgcacattgcaaggagaagttgtcattcagctatcctatttaaagaaattaatttcacagcagcaagaaaagccagaacaggcgcagcagaccgatcacgagctgttaacagagcgagagtgtttgatcctcagagaagtggaaaaaggatacacgaaccaagagattgccgatgtgcttcatttgagcaaacgctcgattgaatacagcttgacgtccatctttaataagctgaatgttggctctcgaaccgaagcggtgttaattgcaaaatctgaaagtgtgctgtaaacgtgtgaagggagagaaccctgatggaagtgagtggatcaaatacactgcttgaggcacttgggattgagattgtagagtgtaatgagtcacgatgcgtagcgacaatgccagtcgatcacagaacaaaacagccatttggactgctgcacggaggagcatctgctgctctagcagaaacagtggcaagcatgggggctgcggctcatttagacttaactcagcaagtttgctcagggattgaaatcaatgccaatcatttaaaatctgtacgtgatggattagtgacagcgacggctgttcctgtacatgtagggcgccgtacaatggtatttcaaattgatattaaagatgatcgggaccggcacatctgtacgtcaagatgcacacttgctgtcattgatcgcatataaaaaagctcccggtgcagcggaagctttttttaggttggattgatccataaaatggtttttttatagaaataaaagaaggacctcacatgtgaggcccttctttcggtttataagtacgagtcttcttttcgtttaatcacgaagttacgaaaaccaccataatcatcttgtacacttcgtttgtccatcttgactccggtattgtaggcggctcttccgatcaagtgtgcgccgaccggagctgttaaaaagataaagacaatcccaagtagaatcttcgcagaaataatgcctgcaagaaaccattcgtgaaagaataccccaactaatatgaggacaacaccaagtgtcgatgcttttgatgcagcatgcatacgtgtataaacatccggcaggcgaaggacgccaatggctgaaataagacaaaggatggcgccaagcaggatgaagaaaatgacaatagctttagcgatgacgatcattttcaatcacttcccctttctcaaggaatttggaaaaagcgacagtgccgataaaggcaaggataccgagcagtaaaataatttcaaagaacgttgtcgttttcagcaaaatggaaacgatggctgtcatcccaattaaattgattcctatcgcatcaagcgcacttacacgatcaggaatagagggacctttgataactcgtataacaaaaagaagggtggacagtgcaagaatgccaagtgaaatttgtaatatgagctccattacttaccactcacctcctgaatcgctttttcaaatgaaacccggatatcgtgaatggctttttccgcatcttcaatatccatcgcatgaatgtataaaatcgaacgatcatcagaaatatcaatgactagtgtacctggtgtcaaagtaatcatgttagaaagtatggtaatttcccaatccattttcaagtccgtacgaaaggcgaaaataccgggcttaattgtgagctttggagataatacggtctttagtacacttaaattggcaagaagcagctcccgaataaaaatcaaaacgagcttgaaaatggcataaagtgcaaagccataaaaacgttgcgggaagaaacggcgcagcataaaaatggcgaccatcccaagtataaaccctgatacaaagcctgaggccgtgtatgtatcattcataaacatccatgtaaaggcgaggagagcgtttaataatatttgaaaggccatgttcatctactccttcagcacagcttgaatatatttttctggtgttgagagcatttccgctgcttgattgatgtaaggagcaatgaactctgttcctaatccaatcgcaagtgataagacgacaagcagtacgccagggtacaccattcctttaattgacggttttcttcttggcagatcctgttcctcgccccaaaatgcgagcataaaaatcctcatgacactataaaggacaagaaggctggatagtaagacaaggatagaaaaagtcataagcccagctgaaaagccgccttccacaattttcagttttcctacaaacccgctaagcggcggaattcctgcaagggataatgctgatatgaaaaacatccagccaagaagtggctgtgattgaatcagcccgcccatctttttcagattgtttgtgccagcgtacacaaagagtgcacctgccagcataaataaagcccctttgatgaccatatcgtgaatgagataataaatggccccttggagtgatgcaggagtattggctgcaattccaaataaaatgaccccgaccgctgtcacaatgttataaatcacgatcttttgcacatcggaataggcaattgagccaatcacaccaaatatcaccgtcagtgcggccagccacgccataaatgtatgagtgaaccctgtatcgtgtataaaaattaacgtaaagactctggcaatcgcatacaagccaacctttgtcagcaaagcgccaaatagagcggaaatcgctgcaggcggtgcatgatacgaccctggaagccagaaataaagcgggaagatcccagcttttaagccaaatacaatcatgaacagaatggaaatgacagtgattaatcctgtttgccctgattcagcgatcttcacacttaaatcagccatattcaatgtaccagtgacggcatataaacaagcgacaccgacgataaataaagccgatgagatgatgttaaacacaatgtatttgagtgattcacgaagctgcggttttgatccgcccagcacaatgagcatgtatgacgccatcagcagcaattcaaagaatacaaacaggttgaagatatctcctgttaaaaaggcaccgctcacgccagctaacaagaactgtacgccagaataatagaacagccgctctctttcctttccaattgtttgaaaggaaaaaagcactgtgacaagcccaacaatggaagcggtcagtacgagcagtgcagcaaactgatcggccacaagcgcaatgccaaatggtgctttccagccgcccaaataaagtgtttgaatcccatttgtgaaaatcgtttggaccaaaaatagattgcacgcgatcgctgtaagagacgcaaaaacgctaaaacctctagacagcatgatttttttattcataaaaatcagcaatgtagcggatagaactggtatcaaaataggtaatataacgagattattcatgctgatcatttcctctcatttgatccatgtcatctgttcgcagctcttggaaggctcggaaggccatgacgagtagaaatgatgtcacaccaaacgaaatgacaatagccgttaaaattaatgcttgtggcaatggatctacataggatgtaatcccctcagttaaaatgggaggagctcctttttttaagccgcccattgttaatagaagtaaatggacgccgtggctcaaaacagcagtaccgacgatgacccgcaaaaggctttttgaaagcagtaaataggtcgccgtcataaagataattccgacgagaatagacattagaaattccattattccttctctccaatcgtttgaataatggtcatggtgacaccgacaacaaccaaatacacaccgatatcaaacaggacggctgttgccagctctgttttccctaaaatcggtaattgaaaataaccaaaggtatgggataggaaaggtgcgccgaacaggaaagatcccataccagtcaatagcgcaatgagcagccccacacctgcaacatagataaagttgaacggcagaatgcgtcttactgtcttcagatcgtaggctaagagcagaaggacgacagcgctggcactcattaatccgccaataaatcctccgcctggattgttatgtcccgcaagaaataggtgaagggagaagagcaggatgataaatgcagtgattttggttgtgacttgtaaaagcatatcattcgtatcaatttttctcatcggcgcactcctctcttccgttttccttgtgtctttaataatccatagataccaagtgccgcaatcgccagcacggtaatttcaaacagtgtatcaaagcccctgaaatcaacaaggatgacattgacaatgttgtctccgcctgcaagcttgtagctgttttcaataaagtaagacgcaatcgtatcaagtgactgattgcttgttgaagcgaaagcaaggcatgtcacaatgacaccaacacctactgaaataatgagattggtcattttaaatttccttgttttttgcttcatgctcagctttggcaagtgatagaagcaaagtaaaaacagtgccacagaaattgtttcaataattaactgggtgagggcaaggtcaggtgccctgaaaataacaaaaaatagtgacagcgtataccccatgacacctagcccgataatggctgttaagcgagaacgagcaaacacagtcgtgagggttgctgctatcatcactaatgacagaatgacctcgtacgtgccgattggagcagcatgctccatattaaatgagaaggcattctgataaaacatgacactcccaagcacgataatcatgaacccaaacacatagacaaggtaatcacgaaggaaaccggtcatataactgtttgtcaggcgatatgaacctttttctaaaccgattagagaacgatcgtataaagtgttaaatgaccatttctccttaaatatgttgtacattggacgccatttcgacaacgtcaaatatccgataatccctaaagctgcaacacctattgtcatataaagctctggctgaaagccgtgccatgcttcaattttgacaacaaaccgttttcctggatcaatcgcatcgggaataatggctgcaatcgcaggttcaatgacagaataagctagaatatttgggaagaagaaaaaggtgaccacaagtgcagcaaggataattggcgggatgagcataccaatcggtgcttcatgcggctttttttctaattgatctaactgaagattgcctctaaatgttttaaagagaagcatcatactgtaaatgaacgtaaagacactagcgagccaagcaatcgctgggaaaatagcgccccatgtcgaaatatctgtaaagttaatctcagaaatacgcagcatacttgtgaaaaacagctctttacttaagaaaccgttaaatggcggaagaccagccattgagaatgtaccgattaacgtaatcgtaaaggtaatcggcatgatggtcattaaaccgcctaatttccgaatgtcacgagtgcctgtttcgtgatcgataatacctgctgccataaagagactgcctttaaacgtagcatggttaatgaggtgaaaaatagcagcaagaacggctgcgccaaaaaaggcaggattgttttcatgaatcgcagctgctcctacacccagcataagcataatcatcccgagctgactaacggtagaaaaggcaagaatggcttttaaatcgttttgacgaacggcgtggaatgatccccaaaataatgtcacaagtccaacgatggatatggtccaaaaccacacctctgaaatagcaaagattggactgaagcgggcaacaagataaataccagctttcaccatcgtagcagaatgcagataactgctcacaggggtaggtgcttccattgcatcaggcagccagatataaaatgggaactgcgctgatttcgtaaaggcaccaagtaagatcagaatcatggcagggataaagtaaggtgatgccataatgagctgaagctgattgactgcttcacgaatactgaatgaatcagttatcaggtagatgaggatgaagccaccaagcatagctaatccgccaaaaacagtaataagcagtgatttggttgctccatatctagagcgttcccgcttataccaatacccaattaagaggaaggaagaaatactcgttagctcccaaaacaagtaaagaaccaccatgttgtcagatagaacgacaccgagcatagcggtcataaacattaacaaatacgtataaaaagagccgagttgttctttttccttcgataagtagaaaatactgtacaagacgacaagtgcgccaatacctgtaatcaatagcgcaaataacaaactaagaccgtctacatacacagtgaaattcattcctagagaaggaatccattcgacctgtgaaaataacgttcgtccatttgatgtcatcgtaatcatctggacaaaatagctaaataatagaataggcaagataagaacaaaccaccctgtatgtatacgctttacgtatttaaaaagaaaaggcacaacaaacgcaagcaaaaaaggcgataggatggcgaagtgaataagctgcaagaaaataaacctccttcaatcaatataaattcacgttctaaagaactggtaaataaaattatagcgtaaatacagacatagtgcattggtttgaactgatttacagtaaactgtatttgttttgagttcttttgaccacaaaaaatattttatcaaaaatgaaactcattgtatattgttttgtatttcgtacatgcttttcttaaaggagctgattacatgaaactaaaagcgggcatcagcttaagcatattctgcacgattttaggaggagcattcttcatagaacgaaatgatcaaaaaaggtggcaggcggaaagtgaatggccgttgttttcagaacatcttctctatatgacctatcaagaggcaagacaatatccattccagccaagagaatatatacgcgtggtctctgccgaagaataaaacccttataggagaaaagaaatataaaaaaagcatgtgcccgtaatagagcccatgctttttattgtttgattaagtaaacattctaagtaagattgttgcgcagatcacagttgctgctccgccaagacgtgtagatacttgtgcgaaaggcatcagacccattcttccagaagctgaaaggatcgcaacgtcaccagtaccgccaagtccgctgtgacagcctgtcacaatcgcagattctactgggtacatgttcatcaatttcccaacgaagtaacctgaaccaaccattccaagaacgacagcgatacatacacaaacaaatggaatagaaatcactgttgctacatcatcaagtggaatgtatagaattccgagaccgaccataagcggccatgtaaagcttcttgatacaaacttgtagaactgctgtgagccatcttgcagatgctgaggcatcacgtttaagtatttgattaaagcggcaagtacaatcattaagattggacctggaatatgaacaaagctttctaacaaaccaccaaaaatgaacgttgtacaagcaacgagtacaccagcacccattaacccgaaatcaacttttggatccatatcaggctgttcaaaaatttcatttgcctcttttgattttacaagacggccattcccgtttagttcaggacgtttttcaccaagcttcttcattgcgccagcacagataatggcaatgacgttcccaatgacggcagcaggaattaattgagaaattaatgactctgctgatacaccaagaatttgtgaataagcaatagataatggcaaaattccttcaccaacaccaccggcaataatcggaacaataataaagaagaacgaatgatgcggtgtgtaaccaactaaaagaccaacaagaattccagcagtcacagctgcaattgtacctgcaacaagaggaacaaacatacgaataaggccttgtactaaaacagttcgctgcatcccaagaatactacctactacaagagcagaaatatagaagtaaaggaagttcgacgttttcataagagacgtaaccgcttccaacgagttcggattcagaacatgaaaaaagaccaggaacgatggtacgaataaagaaagaatcgccggtccaccaatatcttttaagatcggaatacgttgtcctatatctccaaggaaaatccccaaaatcataataacagcgaaaccaccaagcatatttgctggaattttattaaaataagcggcagttaaaataatcgctgcaagtactaaatacacaggtaagtcaataacaccaattttccaagacatgatcttacggaaaacgcttttattattgtcagaatcgtctgtaatcgatttcaattgttgtgtattagccacataaacacccccaaatgctatttgtctcaattgtagaagattctgtgacactcatctatttattaaactaaattaagtgtaataaaagtaaaataaacaggagtttttatgtttttatcatacaaaaatcccctgaaggtagtttatccttcaggggattgatcatacatcgtatttatcgttttccttttaaataaggggtcccaagtgctttcggtgcatctgcccggccgatgaagccagtgagtgctaggatggtaagcacatatggtgcaatgagcatatacacgttcggtatatcttggaatagcggcaggagagagccaatgatgcttaaactttgagcaaatccaaagaataaagcagcgcccattgcgccgaatgggtgccatttaccgaagacaagcgcagctagtgcgatgaagccttgtccagtaatggtagcatgtgagaaatcaagtgcgatggtcgacgcataaacagctccgccaagaccaccaaacagtccactaataaagacgccgatatagcgcatccggtacactttgattcccattgtatcagcagccattggatgttctccgactgcacgaagacgaagaccaaacggcattttaaataaaacaaaccaagcaacaaccgcaagcgctaatgcgagtatggatgtataataaacatctttaaagaatatatcgccaatcatcggaatgtcacttaaaaggggaatatcacctttatagaaaggctctgtaattttatctgtttgtgctttcccgtaaatgagtttcacgacaaacagcgtagcgccaagtgccagcatgttaatggcaacaccactgaccgtttgatctgcccggaatgtaatggttgcaactgcatgaatcaaagagaacaatccgccaattgccattccgacgaggagcccaagccacggggtcaacgccccaaacgtatcagcataaaataagttaaagataatactagaaaatgctccgacgaccatcaaaccttcaagaccgatattcacaacacctgatctttctgaaaagacgcctccaagagcggttaaaataagtggtgcagcatagacaagtgtagctgggacgatgatttcaagaatttgcagaaatcccacttattttcccccctttttcttcatttggttcatcacaagacggataatatagcttgaggcgacgaaaagaataatgatcgcaatgacaatatcaacgacctcagtcggtacgccagattcaagcggcatatttaaagcaccgaccttcaatccaccaagcagcagcgcagcaagaacaacaccaacagcagtatttccacctaataaagcgacggcgattccatcaaaacctacaccggtaaacgagcctttaattgaggcatattcaaatgtgccaagaccttccattgcgcctgcaagacctgcaaaagcacctgaaatcagcatcgcataaatgatattgcgacgaacgttcataccagcataatgggatgcctgctggttcattccaacagcccgcaattcaaagcctttagaggttttttgaataatgacccacatcacgaccgcagctataatggcaacaaaaataccattgtgcatccgggagaaatcggtaatttgttcaaaaaatccagagcgaagcgaggcagtggcatcgattttttctgttttatctttattatttgttaagacatttgagatcaaatagtttgtaacatgaagggcaatgtagttcatcatgatcgtgacaatcacttcatgaacataaaaacgagcctttaaaaacccaggaataaagccccataatgcaccagcagcagctgcggtgatgagtgcaagcggcagatggatatacataggtgcatggacagttgtaccgatccatacagcagctacccagccaatcagcatttgaccttctacaccgatattaaagagacctgttcgaaatgcaaaagcaacagcaagtcctgataaaatgtaaggtgtgacttgtctgatggtttctcccatataataggtttcaccgaagacgccattccaaagggcgccatagccttcgatgacactataaccgcttgccagcataataatggccccaacaaaaagaccaagtacaatggctataagcggaattagcagatttgttaagcgattagacatttgcttcgttccccacttcctgttgcgtacttccagccattaatagaccaagctcttgctctgttgtttcttttggatcaacgatggcaataatgctgccttcgaaaataacagcgatcttatcactgacattgataatttcatcaagctcaaaggagatgagcaggacggctttccctgagtccctttgctcaatcagacgcttatgaacaaattcaattgcaccaacatcaagtcctcgtgtcggctgagcggcaattaataaatcaggattgcggtcaacttctcggccaataatggctttttgctggttcccgcctgacagggcgcgtgcctctgtatattcactcggtgttcttacgtcatactccgcaatgattcgttttgctttttggtaaatatttttcatattcatcaagccaaattttgagtatgggcgctgataatacgtttgtaaggaaatattttctccaattgaaaaatcaagcacaagtccgtgtttatgacggtcttgaggaatatgtccaattccagattcggtcaccttccgaggcggaaggttttgaatggctttcccgtttagcttgatcgtgccagactctgatttttttagaccagtaatggcttcaattaattcagattgaccattgccatctactccagcaattccgacaatttcgccagccttcactgagaggttgagatgtttgactgcctcaattcctcgcgcgtcttttaccgtaaggtcttgaatttgaagcacttcctcagcaggggaggcgtcttttttgtctgttttaaatgaaacttcacgaccgaccatgaggctcgcaagttcatctttatttgtgctttccacatcaagtgtacgaatgccttggccttttcggataatggtcacacggtgacaggcatccataatttctttcagcttatgggtaattaaaataatggatttgccttcattgattaagtttttcataatttgtatgagttctttgatttcttgaggtgttaagacggctgttggttcgtcgaagatcaaaatgtcagcgccgcggtaaagtgtttttaagatttctgcacgctgctgcatgccgacagagatgtcagatacttttgcggcagggtctatttttaaaccatagcggtcagaaagctcttgtacttgctgtatggcttgttctttgtcgatctttccaaacttcttaggctcttttcctaagatgatgttttcagcgacggtgaatgtatcgacaagcataaagtgttgatgcaccataccgatgcctaaatcactagcatcatttggactagagatggtcacaggttttccgtgtaccttgatttcacctttttcaggctgatacagtccgaaaagcacgttcataagcgttgattttccagcgccgttttcaccaagcagcgcatgaatttcgcccttttttagctgcagcgtaatgttgtcgtttgctacaatgccagggaattctttacgtatattcaacatttcaatgacataatccacaggtttaaccgctccttttttagggtgctgataaagataaaaactagcaaaagaaaagctgcaaagcgaggctgcagcttttcttttaccaccttttacgaataaagaggaggtaaaggagaggcaaggggataaggcacgcttatcccgatgctcaaattaagctttaaaatcttttagttcatcacgtgttgcagggattttgacttcacccttgatgattttttgtttccattcttctactttcttcaatacatctttatcaaggttgtcctgagatggagaaatgtcaacagcgccttctttcagaccgtaagtgatcacttcgccgccagggaatttaccttcttttgctttcgttgttaagtcttgtaccgctgtgtctactttcttaatcatagaagtaagagtgacactttgttttgttccaggtacttttccttcgtcatactggtctttatctacaccaataacccaaactttacggttaggatcagcttttttcaggtttttcgcttctgtgaagacaccagttccagtaccgccagctgcgtgataaatgatgtcgacgccagatttgtacatgctttcagctgttgctttaccgatgtctgctttatcgaatgcaccagcatatttcacttccacttttgctttcgggttagctgcttcaacgcctgcacggaatccaacttcgaattttctgattaattcagagtcaacgccgccaacaaaaccgattttgttcgattttgtagaaagagcagccgcaacacctacaaggaatgatccttcattttcgttaaacataatgctggctacgttgtcttttttcacaactgcatcaacaataccaaagtgattatttttacgttgatctgcgatttcactaatagaatcttgcattaagaaaccaattccataaatcaggtcgaatttctcacgagcaagtgtgtttaagttcgttgtatagtcagcgtctgatttagattgtaagtaatcaaagccgtttttacctttttttaaattgttgtctttcccaaaagcttgtaaaccttcccaagctgattggttaaatgatttgtcatcgacaccaccgacatcagttaccattgcaacagtgaattgatctttatcttttttgctttcaccgctgtttgagccagagttgccgcatgctccaaggatggttcctgctgctacgactaaggacaatgctagtccaattttgcgcttcttcaaaacataaccccctataaaatttaaaagtttcagaaaagtctcgcgaaaaaagaccgttctacctcttcttacccttctgaatagggtattttatcctgctttctcctgaaacttgtggagggcaggagagaagatgtaagacatcagacttatatctcgttgaactaatcaatcataatttatcatttccaatcgaataaataaatagaaatttgttttattttaaaaaaaatgttaaaaggctaaattcgatgtctttttatctgctgaaatatgatataatgccgcttttgtgatgtgctctactacagtggaaccgctgatatcaaggggtttgtgacatcgtgtgccataaaaaaacatctggcctctgtaaaaggtcagatgtgtcaaattatagatattgctgaatcaaattcatatttgttgtactgagtttatattggaaaacaggacgtccaattgtcccgtatgccatttcgacatcaactacttcgatgtcctcaaggaatttcaagtattttctaatggagacttgagagatttctgtatgatttgctaggtcttcggtcgtgaaagcttgatgaccgaatgattgaatacttgtccagatgagtttgagtgtgcttttggtcaggccttttggcagaaggactttttctgtctctgcttttttatgaaagagcttcgcatctaaatcattttgcgagatgctgttcatcgtttggtacaaggcgtgtttacgtttatactctgagagcgctgattggaaacgttcaaactcaaatggcttgattaaataatcaacggccccgtttcgcatcgtttgctggatcacgtcgacttcattggcagctgaaatgacaatgacatcaacagaatgattttgtttgcgtatttctgataataggaccagtccattttgtccaggcatataaatatcgagcagtacaaggtgaatggcttctgtttttaagatgtccagtgcctgctgaaaagaggtggcaatcccttttaattcaaaaccgtcgatttgggtcaggtagcgtttgttcagctccccaaccattgggtcgtcttctactattaacacattaatcatgtggatcctccttttgtttatacggaatgcggagactaaaggtcgttccttctcctttttcactcgtgacaatcaggtgtccgttcaattttttgatgctttggtcaacaaagtagagaccaaatcctctgtcttctcctttagttgaaaagccttgatcaaacatgatgtcttgttcgtcttttgtgagaccaacacctgtgtccgtaatctcaatatgaagctgctcctggacgtatcggaatgagattgagatgtttttcgtctcagtatgagaaacagcatcgagtgcgttatttaacaggttgccaatcacggtaatgagatcatgcgtcactgctgggtcctctgaatttgggacttgtgtgctgcatatgacttctaaggtcgcgccttgttccctgatgtagctttgttttcctagtaaaaatcctgctaaaacagagtttttcacatggttgatgatttcatttgtttccgtttgctgatagatcgcaatatctttgatataggtgccaaggtcatcgtagtttttgagctgaaccagtcctaaaataacatgaagcttgttcataaattcatgtgactgggcacggagggcatttgcatacattttgactccgctcagctgctcagccaagtgtttgacttctgttttgtcacggaaggtggcgattgccccaacaatctcgccttttaccgtaatcgggacctcgttaaagacgagctccagtccgttcattctcacgtcgcggtcaagcagcggcttgcgtgtttcaatgacttgctttaagccgcttgaagggaggagcacctgaacatcttgttctctaggatcaaccataatgcccatattatgaaagagccgtttggcttcagcgttggccagcttgattttaccgtgctgatcgaccgcaagaatcccttcttttgttgattctagcatggcgcttcgttcttttaataatgtagcgatctcatctggctctagtccaaacataattttcttcacttttcgtgccacaatgagtgctccgatgataccagaaagaaggctgagcgatatgacgaagtagagcggaagtaagctttgatgaataatcaagtcaatttcctttaacgtaatccctactgccacagccccgagctgctttccatcttgatcataaacaggaacaaaagcacgcatggatctgccaagtgttccagaagccgtactaatatgttctttaccctgtaatgctggtttttcatcaccgccagcaaaccgcttcccgatcttctgcggatttggatgggttttgcgaataccgttcatatccatcacgacaacgaattcggttttggtgattcgctgaacacttgttgtatattgacgaagtactgaatatgatcgattttcttctaatgatttcgctgtgatcggagcctctgcgaccattttggcagtggagagggcgatgtcacgttcctgttgatgaatgttcttagctgtttccgaccagatcgtaaagaatgtgatacaaagggagatcaggacaacgatacaaacaaaaatcgtcagccgtgtttgcagtcttaatgtttttttcacgagtatacccctaacgcacgattttttcgtaatagtaatactttaacgggaaaatgtaagtttgtgaaggaatgtacgtgcaaaatcacaaatttgattttgctgccagtttactttgaaagcatcttgtcaatccgttttaagtgagccataataaatgtgagcttatgagaaaggatctatttatgaaaaatacatatttgactggatattttccgctgatttcgattttactattcagctctgctttttcgattttcacagtagggatcacgactgatttcttgactcaagcaggtattttaaaaggaatgctggaatttttctcggaacagggcatcaggcttgctctttttgctgcttttgcacttgtttattttatgattttatctgccttgaaactgattgcagatacggtgttagagctggcactactctttttcgcgaaagatcctgaaggggagaacttaaagaaaattcggattgcatccgttgtttatttatttgccagcttgcttgcatttctgttgacgcagcagctgattctgcttgtcggactgtttgttttagcaagtcttgtctattttatctgggttgtggttcgcatttatcaatcgctttccatgctgaatttaattggatttatgatgtttattcttctgttttgggcaacgtttttaatcggcattttgtacttatttattaagctttataacagtgttatggcgagtctgccttcttaaacagacaaagaaagcatcctccaccatcggaggatgcttagcgtgtagacaaaccctcgcattcggtgtcagggctgcgttccggtgctcacgaatgttcaattcgctccgctccggtactcgtccttcctagactgcaaaggttttcaggtcacgctgaaaagaagacaaagggctaaaataaaaatcattttagccctttgtcaacaatgtgagcatcctccaacatcggaggatgcttttttatgaaagaaaccgtttttgaatatcgggtgtaggcatcatacaagatgttttttgaccgaaccatttgtagcgatttttcgccatccgctcataaaaccaatcacggatagggcggggaatggcaatgagtaaataactccatttgtagatcccttttaaatgccgcgtggcttttaagatgcctgtcgacttcgtataaagggtgcctttttcaatataaatgaatgaattgaactcatctaaaggcaaaccgttttcttttaaaatgcgctgccctgtatctgattgtaatgaagcaaacatcattcgctcatctggatcacgcttaatcacaaactgaacagcgccgctgcacacgttgcagacaccgtcaaataaaattaaatggggtggatgtgttgaatgcattgcaatcaaacctcctgtttatctggcgtattgcatcgtatttttccaaatacgtaagtgcgggctggagctgtaaattgattcaaccgttcctctatctcttccaacccatacacccattgtatattgatctgtcagtccaacaaaccaaatgtctttgtagtcattggatgtccctgttttaccaccaatgtaaggggaactgaaattcgcttttttccctgttccgctttttacaacggaggcaagcaatttacgcatggtgtcatttgtccgctgagaatacacttgcttcggtgactctttccacttgtaaagggtcttaccgtttaagtctgttacctttgtgatcgaatgactttgcgtgtaagctccttgattaccaaagacggtatacgcatctgttatttctagcggtgagaagcccttcgtaaatccgccaagtgcagaaggaaggcgataatcatccgctacgatatgctcgaatgagaatttctctaaatagctgaagccttttttgacaccgactgtatccagcattcggatcgcaggtgtattgtaagagttcttaaaggctgtttcaagtgtgacagttccatacgttttatgattatagttctgcggacagtatccgctgctgcaaaacttgccggcactgattttgcttgaagctgttgcaccggtttggtcgatgtaaggaccatagtctaaaagcggcttaattgcagaaccaggctgtctttgcgcttgataggcgtagttgaaatcaaacttcttgtagttttttccgccagcaagtgcgacaacttgatgcgtttcatgattaatgaccgctgatccgccttctacaccttggtaagggagttgcgcattgagctgatagacggctcgttgctgtaaggaaggatcaagtgccgtataaattttgacaccatcctgaagcagggcactaactttttcagataattctttttgaatggctttttttgctccatctgttttggctttcttcaatcgttttgtaaagccttcctgatctgacacaagatcggtaaattcctcattggtatatgtcacatagtcaggataaaggtttttcttttcacttaaggacaggctgattttttctttgacggcttttttgtattgctttttggtgatgacgccgtctttctttaaaataccaagcagtcgttcttggcgtttcttcgtgtgcttgaattgtttcaatgggtcatacagtgttgggttgtttggaatcgcagagataaatgccatctgtgcaagcgttaaagaactaagcggcttatcaaaatagtaattagccgcagaaccgacaccgtaaacaccattactgaaataaatcgtatttaaatagctttcgagaatttcatctttcgagaatttccgctctaattcataggaatagagaagctctgtaaactttcgggtgaacgaacgttcatggcttaaatataagttgcgggataactgctgtgtgatcgtactcgctccttggctgatgccatggtttttgacatttgaggcaagggcacgaacaacccccataaagtcaatgcctttatggtcataaaagttccggtcctctgagcggaggaacagctccttcacagaatcaggaattttatcatacgtcacgaacactcggttttcatcgtttgatacgatctcggagatgagagaaccatcccgatcatacatataactgttttgggaaaaatctatcttttccagcttgattttttgatcaagcacttcgttaacaggcttgacacttgcagcttcttcctttgatagataaaaagtcagaacaaataatggaatgagggcagcaagtaataaccaaccaatgattgcacgaaacatgaggtcactcactttcttcaattttctagccatatcgtaccattcttttgcgaatacgagaaggttatttttagaaaagaatgggcgtgaagtctagtgaataaggcttctacacaagaaaaaagagtacctgatgctggatcagacactcctttcttttgtcttcgcatgcgagcggaccgcccataaaaataacgcgccaaacagaaaaattccggcggtgacataaaagacagctggaatcccgtaatgactcgccacaatgccgccaatcaccggaccgacgacattcccaagaaagcggaagctgacattgtatccgagcacttccccttgcatagaggcaggtgctttgatccgaatatacgccgtcgtacacggaataatcccgccaagtgccattccgtatagaaaacggaaaagtactaacatcacataggaatccgccatcgcttgcgggatgaataaaatagaggagaggatgagaagggcaagcagcaccttgtcgtgaccaattcgatctccgagatctccccattttcgtgtaaagagcagattgccaagtccagttgcagagaacgcaagacccgcataaaatgcgagattaacaggaccgtgtaaatcatgaatgtataaagccaaaagtggctgaatgctaaagttccctacttgtgtaataaacgttaaaagcatcgtgaccacaagcaaaggctgtttgaaaatatgaacgagtacatccttccgtgagtaagaaacgcgctttgcttcttttgaacggatgggctgttctttcactccgaaaataatcacaatagctgacacataaatgacagtcgctgtgaggaaaaacgtataaataaatccgacgctgtctgccatgaagccgcccattaatggaccaaacaaccccccggcaacattactcatctgcatcgttccaagggttttacctgcagttgccttttccgtctgtgcagagatcagtgccattgaagtcgagataaagcctgtgacaagccccatgaagagccgcagtgcgaatagctgataaacggtttgcacaagccccattaatagaatacttgttgcaatcccaattccgttaatgagcaaaatctttttatagccatgacggtcaccaatccgtccccaaatcggagaaatcagaaaggccgttaaaaacgtgaccccaaagacatagccgctccacctttggacaaattcatttgaatagctgctatcaagagattctatgtaaagtgataaaaaagggacgatcattgtaatgctggcagatacaaaaaagttcacaaaccacatgatgtacaagtttttcttcctgtttgtgatagagaccaccttctttatttatttcgtgttccttaataattataaaggaaaataaacgatctttcatctgatgataggttgggcatagtgaatctgcattattttcaagaaaatgaagtgatttcaaggtccgtcttaatataatgatatcaggatgaaaaactgacgagaaagtgaggtgagactggtggaacagaaggcggtgcttgtggtcgattttgaatttacgatgcctgatggaaagtatcatccacaaaatttttttcctgaaattattgaagctggggtagtgaaagcggcaagtgaaacgattatagacactttctctagctacgtcaaaccgaaaaagtttccgaagctgacgaaacgctgtaaatcgttcctcggcattacgcagcaggatgtagagagcggaatttcctttgaggcgtttatcgagaagctcgtgtcgcttgatgagggagaggattgtgagattattacatggggcaatatggacatgaaggtgctgaagcaaaactgtatgctcaatcacatcgcctttccttttaagggaaagctgagggacctcgcctttgagtataaaaccttttttggtgatcgtacactgacagggcttcgcaaagcggcaaaggaatacggcagtgaagaagctggtaagcatcataaagcacttgatgatgccatgacgacttatcagctgttaaccctttttgaaaaagacagagcctatgtggaaaatccgcaaacaaccaaaattggtgagctgatcgatttctcacacttttttgattcggctgattagcgggcgtcttctggaaaataatctttttcgagagaagataggcatgctcttgatttttcagcccatttggaatcatccgcatggagcgtttgttttaatttatctacagcttcttttagtgatacttgataatctggtataccgccatcataaggcttcaccatatgatgagggatattcgtctgttcacgataggccaaagcccgtctctcttggaaaaaaggcacgtctgcttcttttgggtgatgcaggtcgccttgagtgggatgtgtcagaacggcttttacttgaacgagataggtcgatggtttcactgctgtcacttccccaacgtaaacacctgttttgtaaaatcctttcacaacttgtccaatttgaatgtctgtcatgtgaaattcctccatttccttctcgcaggaaggtatttcatttcttttagccaatatagtgaagtaaacgagcaaaagggggaatggcgaatgctgtcgttcatcgcactctttctactgtattttcctgaagataaaagggagtacatcccagcggcaatcaccacggtgattttctttattgctgcatttatttgctttcgtctgatcgttcgtgcgtctaagaagcaggagcggatagatgaaaaaaggacaaaaaaaatggattgatcattttcttcttgtatcttcaggaaacttcacggtgacggttgtaccagactgcagcgagcttttgaaacgaatggttccatggtgattttcaatgatagaaaatgtcactgtcagcccaagtccagtccctttatttttcagggtgtaatatggttcgccaagctttttcatttggctttctgtcattcctacaccgttatccacgaaataaaggcatattttatgattttcttttgaagcaaaaagttcaatttccccttcgtgttctggggctgcttcaatcgcatttttgattaaattaatcatgacttgcttgatcttcgtttcatccccttgaatgtataagtctggttcaatggattgatgaatcgtgaccgatttgaaattcgcataggatgtcatcagtgatgcacattcctctagtaatttagatagattgagagattcaatttgataataattttgtttcgcaatgtcaagataactcgtgataatatcctgcgcccggtctaactctgacagaacgagatttttataatctttattggttgacggctcttttgtattgtcactagaaaagagcaattggataaagcctctcaccactgtcagcggattgcgtacttcatgggcaacgcttgcagcgagttcacttacaatggtcagcttttctgactggacgagctgtgttctcatttgcgcattttctttgacgaattcaatggaatagatacttagcacaagaaagaatatgtagtaaagggttgagaaaaataactcaagtaacttttgctgcataataaaggctgggctgtattccattaagctgaccgcaaacagtccaatgtaaataaagaatcctttggataaaccgataagcactccatacatcagctttttcagcttcgaatattgacgccatttccggtagaacagaaatgggatgaaaaagtaaatcggaacaacaatgagtccaacccataagaaggagccatacatcacgaatttgaccatggaacttatcaagatggcgatgatcccagcagtgtaccctccgtataaaatggcaagtacaagagggatggattgaagcccagtctgcaaatctaaaatcgaaccaactggatatataatacatagtgctgaagagatggatgcgaatactgtgatgagcagtttattcgtttttgggaaatgagcaggggtccggcttagccatagcgcatgatataaaaagattggaaatagaataaaagatacatggagcagaaaatccttgaacatttccatttaaatgctctcctcgtaaataattgtaattcctctcattatatcatctcatgtacaaagtagatatgataaaaggagggtttttttctttaaaaagaacacccgttaggatgttctttcgattgtatagggcttattcagatgatcgcgtgaacgcttgatgaaggcgtttcaatccttctatgactgttgaagcaggacagcctagattcatccgaataaagccgtctccttcgtgtccgtaaacgtgaccaagctctaggatcactttgccctttttcagcagattccgtttcaattccgcttgactgaattgataatcccgaatgtccagccacaataaataagaagcatctggtttcatataacgcatatttggaaggtgttcgtcaatatagtccatcgccatttttatattgttttcgagataaagaacaagtgcatcgagccactcatccccgtggcggtatgctgcttccatcgcaggaatcgcaaatgcattcagtttggctagtccgtttctttgcaattcattggtgaaaagggttcttttttcttcatcggaaatgataatggcagatgcttggaggccagctaaattaaatgttttacttggtgcaatacacgtcactgtgatatgtgctatgtcgtcagaaagactagcaaatggcacatgcggctttccgtatagcatcaaatcagaatgaatctcatctgaaacgactgtgacaccatgcttgacacataagtctcctactcgctttaattcttcttttgtccacgctcttccggacggattatgcggatgacataggaacatgagcttcgcttctggtctgctcagttttttctctaaatcatcaaaatccataagatagcggttgttttctatttttaaagggttggttgagactgtacgtccatttcgctcaatcatttgataaaaaggcgtatacactggtgactgtatgaccacttcgtcattcggtgctgtaaaggcttggacagcaaaactaagtgccgtgacaatccctggtgtgaaggtgacggcttctgtttgaatcgaccacccgtgtcttcttttgagccattcggctactgcctgctgcgtatcctggtcttgaaaggcatagccaaatacgccatgatccaatcgctctttcaatgcatcaaggacgacctgcggcgctttaaaatccatatctgccacccacatcggcagtgcatctgttgtcaggaacaaagactctgcttggtcccatttcactgattttgaacctttacgtatgatctgttcgtcgaaattcatgaaacccacctctagccgtttttcaaccattgttggttgtgctaaaataaacatcacaaaatttattataagcggtgataccgatgaaagatagtcaagctgtagaagagatgattcaacttattaagacatgggacccttttcaatatggagaggacttttatgaaacggagcctgctgacgtcatcagtgcattatacgacgcagaagactctttatctttagcaaaagacattcaagccatttatcatcactcatttgagcagctcctgcctttcgaaagctgtcaacatatagcgaatcagcttttcgtcatacgagacagcagctcctgcacacgctaagacaggctgaaatgtccgatttgatcagacacaaagaccggattttcctcaggaacgaggtgcccggttttttttaatgcatgcaaggtcgagtttggcagatccttgtgcagtctttctcctatttgaatgggaacgatccgatcttcctcaccccaaatgagcagcactggtgtctccattttctttaggacatccgaggtcaaatcgccttcccggtgccgaatcaagcggaaaattcctcggaaaatttgatcatcagaaaaaggctttaaatatccgtccaccatctcttgatcaatgatggaatgatcatgtacaacagcggttaaatttttcattatgccttgcttcaagagctttcttttaagatagagataaaaataaggaatatatgtgctgtaaacaagcgatctctttgatttatttaaataccctgagctgcacaaaagtaccgccttttcaaataggtctggccgttcagatgcagcgtataaagcaatttggccgcccatcgaatgacccactaggatcgcatgctgaatctgcaagtaaccagctagctcaataatgatctttcccatgttgcgatagctgtaaataaacgtattcgacttctcggactgtccaaacggcggcagatcgattgcaattaaattgaagtcttgtttcagaagcgggatgagctttcggtagctgaaggtagaagagaagagtccgtgaattaagatcaatgttttcttccccttatttggatagtgctcataatagatatctaaaccgaatttacttttcatataagctggctgaacaaagtccacactcatcactccgatacttgatactctctctgttaggtgactgtattgtaccctaaaaagtggattttaagctatggttagcatcttttccctgcttagcataatgggaaaaacgtgctataatgttcagaagattttttaaaactagctttttacaatctgaggtgtgaaatcaaatgaaactaacagaaaaagaaactgaaatattagagattttagatgaaaacagccgcgccgatttaaatacaattgcaaaaatggcaggcgtgacaacagaagaagcagaagcgattattcaaaaacttgaagatcaaaaagtcattattgattattcaaccatgattgactggcgtaaagtagatggtcacgaaggcgtcacagcaatgattgatgtcaaagtgacaccaaaaagaggcgtcggatttgatgaaattgctgaacgtatttatcgctttcaggaagtggagtctgtctatctcatgtcaggtgtttatgatctatctgttgtgatccgcggaagatctatgtctgatattgcccgcttcgtgtctgaaaaattatcgacacttgattccgtggtttcaacaactacccactttattttgaagagatataaacatgatgggaaagtgtttgaaacaggagacgatgacaaaagaatcgtggtgtcaccttaaatgaaaaagtcttatttatctgaaacggtacaaagcattcagccgtcaggtattcggaaattctttgatttggcagccacaatggaaggggtcatttccctcggtgtcggcgagccagatttcgtgacagcttggaatgtcagagaagcaagtattatgtcattagaacaagggcttacctcttatacggcgaacgcagggttgttatctttgcgaaaagaactgagccactatttatataagcggtttcacattgactacagtcctgaagaagaacttattatcacagttggcggaagccaggcacttgatttggcctttcgtgcgattttaaacagctgggatgaagtgatcattccagagccttgtttcgtagcatatggggcccttacgacacttgcaggcggagtacctgtttatttaagtacctcggctgaaaaagatttcaaagcagactcggcggatctgcgcacgaagctgacgcctaagacaaaagcgatcctgctttgctcaccatcaaatccaactggctctgtctattcaaaggaagagcttgaagatattgctcaatttgcaaaagagcatgaccttctcattatcacggatgagatttacgcagagctgacgtacgatgaagcttttacaagcgtggcggcaattcaagatatgaaggaaagaacgatcctgatttcaggcttttcaaaagggtttgccatgacaggctggcgcttaggatatgtggcagcaccacctgtactgcgcgatgctatgctgaaaatacaccaatattctatgatgtgtgcgcccgctatggcacaatatgcagcagaagaagctttgaaaaatgggcttgaagatgtagagaaaatgaagaaaagctacagaaggcgccgtaatttgtttgtcggctccttgaatgaactggggcttgcatgccaccagccaaacggcgcattttacgctttcccgtccattaaaacgacgggcatgacgtcagaacaatttgccgaggagctgctcctgagtgaaaaagtagccgttgtccctggtaatgtcttcgggccgagtggtgaaggtcatattcgctgttcatatgcttcgtctcttgaccatcttcaggaatcactttcaagaatccagcgctttttgcaggaacgacaagtgaaagaagaagcacctgtcatctaaaataaaaaaaggcatcaatccattaggactcatgcctctcaaattaggggggaatactagaaagcattcttgttttcaggtattcccccttttgaactgatctaaacccaattaaaaaatattttgcgtaactgaccgttctatgatatagtttttaattgcgtataaacgaatattaaaacatttatttaggagttgttatcatggcgacaaagtttgaagtaggcagtgtttacactggtaaagtaacaggattacaagcgtatggtgcgtttgttgcattagatgaagaaactcaaggacttgtgcatatttctgaagtaacacatggctttgtaaaagacatcaacgagcacctttcaattggagacgaagtacaagtaaaagttctttctgttgatgaaaaagcaggtaaaatcagcctttctatccgtgctacacaagatgcacctgaaagaaaagaaagcaaaccaaagaaacaaagaccacagcaagtgaaagaagaagctgctgcaccacaaggtttcaatacacttaaagataaacttgaagagtggattgagcaatctaaccgtaaagatcttatcaagaaataaaaaaagcaccgcttcaaacggtgccttaggctgcctcgtataggcggccttttttatgtctttttgtttagcgaacctctggattcggctcgtcacggcgaacagcttcttcgcttggcttgaacaatagaccaaggttaacaagacctgcaattccaacaagaccataaataatacgtgataatgcagagccttgtccgccaaagatcgctgctactaagtcaaattgaaaaaagccgattagtccccagttaatagcaccgataatcgtgagcacgagggcaatacgctgaatagcactcatcgtgattcctcctttcgctacagcatcaatacatttatattttgcagatttttagccaaactatgcgtaagaaaatggattaaagcaaattactttacttttggaatgattgaggcgcataatgtagcgcgaggaggagatcaaatggatcgatttacttattggaacccaacgaaattaatgtttggaaagggagaagtatcagccctttcagatgaactcaaacactacggaaaaaacgtattacttgtatatggtggaggcagtattaaacgaaacggcctttatgaccaagttgtcagcatcctaaaagaatcaggagctgcaatcactgaacttgctggtgttgagccaaacccgcgcttaacaacagtaagaaaaggggttgagctttgcaaagagaacaacgttgattttattttggcagtcggcggcggcagtgtcattgatgcaacgaaagcgatcgcagctggagcgaagtacgatggagatgcttgggatatcgtgacgcgtaagcatgtcccaatggaagctattccgttcggtactgtgttaacacttgctgcaacaggttctgaaatgaactctggatcagtgatcacaaactgggaaacaaatgagaaatatggctggggaagtccagcagtcttccctaaattctctattcttgatccagtgaacacattcactgtgccaaaaaaccatacgatttatggcatggttgacatgatgtcacatgtgttcgagcaatatttccatcacacggaaaatacaccttatcaagaccgtatgtgtgaagggcttcttcgtacggtcattgaaacagcaccgaagctgatcaacgatctagagaactatgagctgcgtgaaaccatcttattcactggcaccattgcgctcaatggtatgctgtcaatgggggcacgcggtgattgggcttctcataacattgagcatgcggtatctgctgtttatgatatccctcatgccggcggacttgcgatcttgttcccgaactggatgaagcatgtcattcaggaaaacccaggccgctttaaacaattagcggtacgtgtattcgatgtggaccctgcgggcaaaacagacgaagaagtgggcttagaaggaatcgacaaattgtcagctttctggacaagtcttggtgcaccaagccgtttagcggactatgatatcaacgatgagaaaattgatttaattgcagaccgtgcaatggcacgcggtgaatttggtcaatttaaaaagctaaacaaagaagatgttctagccattttgaatgcttctttataatcgaacaaccaaaagatagctgctttcgagcagttatctttttttgagttcgacgtgtacatatgttaaagtagtctttcatgtttttggatatatacgctgtaaggagatgtatcaacagatggaaaattttatttactataatccaacgaaattaatgtttggaaaaggacaactagaaggactaaagagcgaactcgctcgttatggaaaacgagtgttacttgtatatggtggaggcagcattaagaaaaatggtctttatgacaatgtgatcagcgcgttaaatgaagcagaagctgaagtatttgagctgtcaggtgttgaaccaaacccgcgccttaccacagtggaaaagggaatcgacatctgccaaaatgaaaaaattgatttcttattagctgttggcggcggcagtgtgattgactgtacaaaagcgattgcagccggagcagagtatgacggagatgtgtgggacattatctctaagaaaacaaccgctcaaaaagcattgccatttggcacagtactgacacttgcagcaaccggttcagaaatgaatccagactctgtcatcacaaactgggaaacaaatgaaaaatatgtgtggggcagttcagtcactcatcctgctttttccattctagaccctgagcatacatattctgtgccagaaaaccagacggtgtacggcatggtcgatatgatgagccacgtcttcgagcaatacttccataatgtaaaaaacacgccgctacaggatcgaatgtgttttgctgttcttcaaacagtcatcgagacagcaccaaaactgcttgaagacttacaaaactatgagcaccgtgaaacgatcctttatgcaggaacgatcgctttaaatggcacgctgcaaatgggctactttggagactgggcgtcccatacgattgagcatgcggtatcggctgtctatgacattccgcatgcaggcggacttgccatcctcttcccaaattggatgcgtcatacactcgatcacaatgtggaacgctttaaaaacctcatgctgaacatgtttgacatcgagacagaaggaaaatcagatcgtgatatcgcattagaaggaatcgacaagctgtcagccttctggacaagcctcggtgcaccaagtcgtttagcggattatgacattggtgaagatcagctggacaaaattgccgacattgcggcgaaagaaatggaatacggtggttttggtaactttatgaaacttggtcgtgatgacattctttctattttgaaagcttctttataatcctgcttgccgtttctcatagagagaaacggctttttgctatgccagtgacgatcacttgatttcaatagctagttccgctaaagtgaaagggacagaactaacgtaatggagggcttacaagcgatgacacatattcaatttgactactcgaaagcgttacctttctttcaagaacatgagcttacatatttaaaagattttgtgaaggtggcccatcataatattcatgaacaaacgggtgcaggcagtgattatttaggctgggttgacttaccgaagcaatatgatcgcgaagaatttgcccgcattaaaaaaagtgcagataaaattaagtctgactctgatgtcttgcttgttgtcggaatcggcggctcttatctcggcgcacgtgcggcgattgaatttttgaaccactctttctataacacgctgccaaaaggcaaacgcaagacgccgcaaatcatctttattggaaacaacatcagttcttcttatttaacagatgtgatggatctattggaagatgcagatttctctattaacgtcatttcaaaatctggaacaacaacagagccagcgattgcgttccgcatctttaaaaagctcctcattgaaaaatacggtgctgaagaagcgaaaaaacgtatttatgcgacaactgacaaggcacgcggtgcactgaaaacattagcaacggaagaaggctacgaatcatttatcatccctgatgatgtaggtggacgctattctgtattaacagcagttggtctattgccaatcgctgtgagcggtgcagacattgatcagatgatggaaggcgcggcaaaagcaagcgaagacttcgcttcatctgagctttctgagaatgcggcataccaatatgctgtcgtccgtaatgtcctttacaataaaggcagaacgattgaaatgctgattaactatgagccaggcctgcaatactttgcagaatggtggaagcaattattcggtgaaagtgaaggaaaagatgaaaaaggaatttatccttcatctgcgaacttctcaacagatcttcattcacttggtcaatatgttcaagaaggaagaagagacttgtttgaaacaatcgtcaatgtagacaaacctcgccatgagcttgtcattgaagcagaagaacaagaccttgatggcttgaactatctagcaggaaaaacggttgatttcgttaataaaaaagcatttgaaggaacgatgcttgctcatacagatggaaaagtaccgaatcttatcgtcacaattcctgagatggatgcttatacattcggatacctcgtttacttctttgagaaagcatgtgcgatgtctggatatctactaggcgtcaatccattcgaccagcctggagtagaagcttataaagtgaatatgtttgctttattaggaaaaccaggcttcgaagagaaaaaagccgagcttgaaagccgcctgaaacaatcgtaagagtaaaaaaggcacacctttgaaaggtgtgccttttttgttttctcacggttcctgtgcaagcttcctcatgctctgtacatagaataatgagtagaggagggtgaaacatgagaacgaatcatatttacattcacgatatttctgaccaggcaatcgtcaactttggcaatgtcggacgtatttgtcctatgagtgctgtcaaggatactgaaggtgctggcagtgtgaacgagacgaatcaattatccaatcaaagcttatttgatgctgcttttacaaacaatgtacaaatcacaagaggtagatgtatgaattcctctctttaacgaaccctattatacaaaaaggagggtttcgtatgattcatgtaccatccaggctgcctggtgaaagcttttcactttaccatttagaagagaccatgaagccgctcggttatgtcattaatggcaactgggattatgatcacgggtactttgattataaaattgataaccgtgatggctatacttttctcagagttccttttacagccgaaaaaggccagctggatcagccaggcgttgtggtgaaaatgggagatccatttctcttaaagcatgtatatcaagataagttagatgatcatgcgatggttggaaatgtgggagcatcctttaaccaattccaagaaccaaaagagaaagatggagatgtatcaaaagcttatactgagattggcttttcactcgtcaaggaattagaagacgcactgctttaaaggctgatcagttcatcctctggatgaagctcatatccaaagggaggattcatcatgggtccttcttttttttgtacaccgacaatgatcacatgatgctctaaaaagtgatggagcactgttaagaatgtttctccggctaacgaagctggaaccggtatgatggtgacgtgtttatgcaaggtcatatgtctttttttctttaacgctttgaactgttcctttagaagaaaatgttcgaccattaaatgattgactgcatcagaggtatgaatgacttgattggcaccagcacgctcggcatttttcacgtaacgatctgttaagatttcaattaaacagtatagcgaaggatttaatccttttgctgcaagtaatgttaaaacactctgcatatcagctgtcacttcattttcgtgctgatctgcggtaatcatcagtgcatctgcactggtaatattggctttgcgaagtgtgacatcttcggtgccatgccctttaataaaatgaacattctctaaaagtggcccttccttcaaggagtcatcaatcagcacaatcggcatagctggatcaatcgtttgaaacgactgaagcagtttgttcgttttctcattccagccgacgataatgagatgtcctttccctttaaaggcgacctttccttctacataatggtgctgcttgctgaacacagcggcggcaagcgtggcgaaataagctgtgacaaagcttgcgccgatcaaaatcagagccatacccgctacttgtccaggcatggtttgcggcacaaaatcaccatagcctaccgtagagactgtaatgagcgcccaccagatcccatcaaagatcgtatgatactgcttcggttcaagcaaaacgattaattgtccaaaaaaaagaagcaagaaacagatgatgatggcaattcgaagatagagtggccaccttagccaagcgataaagatacgatttgatttcatcggactcttcctttcaggagactgctaatgtcagtatgcccgattgaggaacattttttcatcttcgtcatgtattgaaacagatcccatatcttaaaataagagagaagaaggagggaatgcgaatgtcgttcgttcaaaagaccgtacttctttttatcggtgcgcactttttatcatcagctgtgatcttgctcgtgtttgacttaaatgctgtgaatcattttatgagtgatttttcatggctgcacttttttcaagacctatacggaacagtgaccttttatacagcatgcttaggtgtgttcttctttttcattggtgcggttattccccttaaaaagacctagtgcttttttctgtacacgttacataaaagtcattaaaattgtaaataaatatataaaataaaaaggaagctgatgagcatgctgtttttttattttttaacatttgccgcattgggattgtcattttgggcacaatttaaagtaaagaataattttgaaaagtattcaaaggttgaagcatccagtatgaaaacaggtgcggaaaccgctcgacatattttagatcacaacgggttatatgacgtgcctgttgaaccggtaagaggaactttgactgatcattacgacccgacgcagcgtgtggttcgcttatctgaacctgtgtactacggtcattccatatcggccatttcagtcgcatcacacgaggttggacatgccttgcagcatcaggaatcctatggtgcgcttgtcttgagacataagatcttccctgtcgtgaactttgcatctggtgttgccccgcttcttttccttggaggaatcttgctcggcagccttaacttaatcgggcttgggatcattttgttctcagcggctgtgttttttcagcttgtgacattgcctgtcgagtttaatgcaagttctcgtgcaaaagatatcattgtttcagaaggaatcattagaagcagtgaagaaagaggcgtgaacaaggtgttaaatgctgcagctcttacgtacgtcgcagcggcccttgtttccttgtttgaattgctccgttttgtaatgatcttcctaaatggccgtaatgattaattgatgccagaggaggtgagcccttaccattgttaggtaagggtttttttgtatattttaaacgtatttttagtcatattacttattgctgcgacagcattttttgttgtcactgaatttgcgattgtgaaaattagaggctctaaaatcaatcagctgattgaaagcggtgataagagagccatccacgtacaaaagctcatatcaaatctcgacgaatatttatccgcctgtcaactcggaattaccatcaccgctttaggcttagggtggctgggcgagccgacggtggaacattttctgcatccgctgtttgaggaattagggcttcattccgcattaaccgacatcctatcgtttatcatcgcatttgtgatcattacgtttttacatgtcgttgtgggagaactggcgcctaaaacgattgccattcaaaaggcagaggccgtcagccttgtgacagcaaagccactcatctttttctataaagtcatgtacccgtttattaaagcattaaatggggcggcacgaggcattgtgaaattattcggttttcattctgtcaaagaacatgaagtggcgatcagtgaggaagaattgcgtctcattttatctgaaagctatgagaagggcgaaattaaccaatctgagtacaaatatgtgaataaaatttttgaatttgataaccgggtggcgagagagatcatgatccctcgtacagaaatttcagccatagaggttgaacagacgcttgaagacatgacgcattatatgctgaacgaaagatacacacgctaccctgttattaaagaagacaaagatcatgtgattggtgtcatcaatagcaaagatgtgtttaaggcgagcttcctgaatcaagatgtgacgattgaagacttaatgcgtccggtgattcgggtgattgaaagtactcctgttcaagaattgctcattttgatgcaaaaggaacgaattcatatgtcagtgctcgtagacgaatatggaggaacagccggtcttgtcacagtagaggacattttagaagaaatcgtgggcgaaattcgggatgaatatgatcaagatgaaacacctcatatcgtcaaaaaaggtgacttccactatgtaatggatgggaaagccttgattgatgaagtaaatgatttattggatttagccattgagaatgatgatgttgatacaattgctggctggatgatgacacataaatttgattttgagattggagatacgattgaagcagaaggctgtgaatttaccatcatagatgcagaagaccatcatattcggaccattgaaatcaaaaaggttcactttttctaaaaacctcgtaacacttgacgaggtttttttagttggtaaactttaggtaagagaatgccttctgccgataagcagtgatttatttcacataaaaagggtatggttttatagaaatgacaaaaaggagccgctcatatgaaaaaaatcaatgtacaaacaaatagacgcgatgagatgatcgacgtgacgaacgagatccatcaatatgtcaaggaaacaggtattcaaaacggaaccgtcatcgtctactgtcctcatacgacagcagggatgaccattaatgaaaatgcggacccagatgtgaaacgagatatgctccggaggcttgacgaagtctttccgtgggaacatccgaaggaccgccatatggaaggaaatacagccgcacatatgaaagcgagctatatgggtgctacgcagcatgttctcatcaatcatggtgatcttgtacttggcacgtggcagggaatctatttctgtgagtttgacgggccgagacatcgccatttttatatacaggtgtcttcaaacgaataagagatgggggaaataaatgggagatattacgaaattactgcaaatcaaatatggaattattcaagcgccaatggcaggaggcgccgtgacatcgcagctggcagccgctgtttcacagtacgggggacttggcagtttggcaagtggatatgtgcagcctgacaatttgaggcagcagatcagacaggtcaaacagctgacaactcgcctgtttcaggtcaatgtatttgtaccagagccaattcctgaagtcaaaaaagaggatgtggcattttgggagaagagactgcctgcacgaccagccgctgataggctgccgagccaagaggaattgtgggatgattttgaacagaaaatcaacattattcaggaagaagacgtaccggtcgtttcctttaccttcgcttgtccaaatgaacaaacgattcatcgcttaaaacaaaaggggatctttttaattggaaccgccacaacaaaagaggaagcactgcttttagaggaaaaagggatggatgccattgttctgcaaggaagtgaagcaggggggcaccgaggtacctttttacctgcaaaaggagatgccctggtgggactctttagtctgatctctgacgtcaagccgctctgtcatgtgccattgatcgccgcaggcgggatcacagaacgagcaggtgtgaaagccgctctagcgcttggagcggatgcggttcaaatcggcacacgatttttagccagccaggaaagtgctgcggcagacgtatacaaaaaggcgattttacaggcagaaagcagtgaaacaaagatcacgaagcttttttctgggaaaagagcaagaggaattgtgaatcagtggatggaggaagaaagacagaatgaagatagggttcttccttatccggttcagcatgtatggacgacaccgatgcgaaaagcagccgcggctgcaggaaaccaggatcaaatggctctttgggcaggacagggcgttagccgtattcactcgattttaaccgttgaggagatcatgcatgaactgacgcatatataaattcatgttgggtggtgtgaaaggatggacatcttaaagcattcataccgaaaaaaaggacaaattgaattttggtttgatgaatttccgtactcttctgccgtccttacgcccattcgtcgttactattttgttcgttacgtaaaatggagccggcacgattcgccggtcacaagaaaagacttagaaaaaatggagatccttgcgaacacgatgcttggcacgctgcaagattatcgtaaacgcaaggcatacaaaagccccttgtcataaccaatagacaagaggctttttttagctgccaaacatttgcctgagataaatcacatccatccgggtggtctgcggcaatagataagcagattgaacagcacctggccgccttctcttattcaatttgtcgataatttctgccgctgttaaaatcccaagtccatgtccgtaatattgatcttctcctaagtaaatcacattttccccgcgccactgtgactgctgatagctaaactctggattttcaaaatataagcaatccccatagataaagtcattcccgcgttctgtataaatcgacaatgtatcataatgccagtcatacagggttaagctgcgaagccttcggttaaacttctcgtctcctaccgtttgcaagacccccatataaaatacgatcacaatggctgtggcacattcaaatgcatattgtgagccattttcaaaaatgtctttaattcctctagatggttccacttgatagcgcagctctagtgctcctgcttccgatacacgccaaaaggcatcatttgcacgagatttttggaagatggcaaatgaggcaccacttttatgcaaatctcttgcagcattcataatgttcgatctcaatgtgacctcaaataacaaatcagatgcttgcctgtagcggaacgtatcatttgaggcttgtaactgcatcaaaatgatccgcttttgtccctctagctgaaatgaagccagctgctcatttgtcactgactgtcctgaaagaataatcatatgaaaagcgcccccttttgtattagcgtatgcaagatgcttgggcaaggaatcaatttgtgaaaataaacaaaaaggcatcctttttaattgaaaaacatgaaaataatatgaagatgtccgatatataacatatcgtttaaaaggaggaaaaacatgaaaaatgcaataaaatggttgaaaaaaccatcgatttctaagagactgattatttcattcacgctcgttcttgtcttgccaattattacactcagtacgatttcatatcagattgccaaagaagaattagatcatgaaatcatgtacggagcaaacacaagagtcaatgaactgaatgacatgattcagcaaaagcttatcaataaggaaaacgcagtaaaactctttactgaaacatctactgctgcagactttaagaagaacaaccaggacgaactgtatgagcatttcgagatatacagtaaaatcaatgaagatgatgtggttggcttttatgcagcaagtaaaaagcgtgatttcattcagtttcctaaagtagacatgccaaaaggctatgatccaacaacgcgtgattggtatcaactagctatgcaggatgacagtggtaagccagttgttactaatccatacatctctgccacaacaaacggcatggttgtcacgattgcccagcgtctgaaggacgggtcgggagcgatcggaattgacattgatgtgcaagacattgtcaataaaataaaagagattaaaattggacgacaaggatatccaattattgcgaataaaaataaacaaattgtggctcatccagaagaaaagtcaggatctaaggtcactgaaaatatttcatctatcctttacagcggaaaagaaggaacgtcaacttatgagaataaaggagaacaaaagcgtcttgtttttgtgacaaatgatttaacaggttggaaaattgctggaacgatgtttgtatcagaaacagaagaagcagcacagccagtttggaattctgccattattcttttaatttcttcatttatccttggcggcgttgcgatcttctttatcgttcgatccatcacaattggacttcgaaagcttgttgatttctcaaacaaagtgagtgaaggggatttaaccgaaacccttgaaaccaaatcgaaggatgaaataggagagctgacaagaagctttagcaaaatgagtgaatccctccgtgacgtcattcgagcggtacagcaatctgtcgacaatgtggcttccgcttccgaggagctgacggcaagtgccagccaaacaagtcaagcaactgaacatatcacgatgtcgattgaacaattttcaaatggaaatgaagcacaaaacgagaaagtcgaatctagtacgaatcagcttgtggcaatgaatgaagggttacaagacatgtcacatacgtcatcagaagtggctgctgtctcacttcaatcgacagaggctgctggtcaaggcggccgaattgttgaaagcacagcgagccaaatgaaacatattgatacatctgtacaagaagcagaacaagtcatgaaacaattagaatacaagtctaaagatattacgagcattttaaatgttattaacggcattgcagatcaaacgaatttacttgcgctaaatgcagccatcgaagcagcaagagcaggtgaatcaggacgcggcttctccgtcgttgcagaagaagtgagaaaactagctgtccaatccgcagattcagcgaaagaaattgaaaagctcattcaagaaattgtgttagaaattgctaaatctcaagatatgttcaaaacggtcaatcgagaagtacatgcaggactcggtatgacagaagaagcaaaagaaagcttccagaacatttatgaggcggcagaaggaatgtcgaaaaaactgactcaattaaacgatacagcgattgatctatcgagcggttcaaagcttgtctcacaagctatgcaggagatgcgccaagtctctagagaaagtgcggcaaacattcaggacattgcggcttctgctgaagagcagctggcatctatggaagaaatctcatcttcttctgtgacacttgctaacatggcagaggaactaaaagagctcacaagtcaatttaaaattgattaaaaaatgatgaaaaaatacccagaattgtctgggtattttttttatgtttaaacatcgttttcagcctgtaaaaataaacctttcatccgataataactttagagaagtaaagggggaaagagaaaatggggaaaatgatccaatggttaaaaaaaccatccatttcaaaaaaattaattattgcctttttggtagtccttatcctgccaaccactgcactgacaattagtgcattttttacatcaaagacagagctagacaaacagattatgggcagtgcgatgagtcaagtcaatgcatttgataccttaatcaatgagaatataggaaacaaagcagatgctgtgaccctgtttacagatacactcaaagcgtctaatcttcaagaaaaaaatagaaatgcgaccattaaagaattgcagcaatttggaaaaattaatgaaaaagatgtttctgctatctatgcaggctccgaaaagggattgtttatgcaatatcctgttcaaaagatgcctgatggctacgatccaagagagcgtccatggtatcaagaggcactcaatgcagaaaacggcaaacaagtcatcacaaaaccatacgtagcagcctccacagggaaaatggtcatcaccattactcaaaaaatgaaagatggttcaggtgttattggaattgatttagaaattgacaccctactgcaaaaattaaaagaaattaaaattgggcaaaaaggctatgcctttatcatggagaaggataaaacagttttagcagatccgacccaaaagccaggaagtcaggtaaatgagaatctggcgaatattatttttaaaaacaaagaaggaaacggcagctacacactcaaaggaatagataaaaaggttgcgtatgtgaccaatgaattaaccggctggaaaatcggtggaacgatgctcgtatcagaagtagaagatgcagcaaagcccgttttcaatacagccattattgtgttcagtgtgacacttatcgtagcaggtacccttatcttctttatcgtccgctctatatctaaaagattatccaaccttgcccgcttctcgaaaaaagtcagcgaaggtgatttgcgcgataagcttgagatccaatcagatgatgaaattggccaagttgggaaaggctttaatacaatgattgactcattaagaaccctcattggtgccgtccaaacctcggtcgaaaatgtcgcttcttcatcagaagaactgaccgccagcgcagggcaaacaagtaaagcaacagagcatattacactatccattgaacaattctccaatggaaatgaaagtcaaaatgacaaagtcgaatccagctcagacgagttagaagaaatgaaccgaggccttcagcacatgaatgagtcggctgaatccattactgcttcatcgatcaaatcaacagatatcgcaggggaaggcggacagcttgtggaaaaaaccgcttctcaaatgaatgtgattgatcagtccgtgaaaaaagcagagaatgtcatcagcgctcttgaaagtaaatcaaaagacattacacaaattctaggtgtcatcaatggaatcgctgaccaaacgaatttacttgcgctaaatgcagcaatcgaggcagcaagagctggggaatctggcagaggcttctccgttgtagcagaagaagtaagaaaactggctgttcaatcagccaattcggcgaaagaaatcgagaatttgattaaagagatcgttcaagacatcgatgtatcacaggaagtattcactgcggtgaatcgagaagttcaatcaggcttaagcttcactgaacaaacaagagtcagcttccacaatattttcgaaatgacaaaagaaatttctgaccagcttcaaacgatgaatcaaacggttatccagctttcaaatggctctgcccatgtgtcagaggctgtccgtgagattgcagacgtctcacgtgaaagctccgcaaacattcaagacattgcggcttcagcggaagaacagctggcatcaatggaagaaatcagctcatcctctgctacgctctcatcaatggcagaagaattgcgtgatttgatcagcaaatttaaagtcgaataggcataatgaaaagagtccttcagctagagggctcttttttcattgagtaaatcaaaagaaataggtagatttactcattttgattaattttcgaacattaagtcttgaaaaataattcgtattacctaagaatagaaggggaagaccacaaatcataattcaaaaggagtagagtcatgaaaaaaatcaacttttttaagcactttacaatgtcgaagaaattaattactgcattcttagcgattctcctagtgccaattctcgtattggcagcattttcttatgaagtggcatcaaagtctctcaatgatgagattatgtctagtgctgcaaatggtgttcagcaattaaacgaactcattaataaagatgtacagcctaaaattgatatcgtttcctatttagccaaatcggtaaaaaagagtgaattggcttctaaaaacaaggatttactcaaggtaaaattagagcaattatcggaaacagatgaagatgtggtggaagtattcattgcagatcaaaatggtaaactaaccgaatattccaagattcacaaaggtagtgcctcgagcgcaaaaaacgaatcgtggtttcaacaatcgatgggagatgagaaactcatcatttcagatccttttgtcggcaagtcatcagatgacctgctcatcacaatatcagaacaattagcagatggttctggtgtgattgggatcaatgtgcgcttgaacacgatcgtgaaagatacaaacagcatcaaaattggcaaagaaggctatgcgtttgtcgcgactgcagatcagcattatattgcccataaaacagacaagcctggggcgaaattgacaggtgatttcatatcgaaattgtatgataaaaaacaaggcagcttcaaatatgaatacaatggaaagccgaagcaaatgttttttgacacaaatgaagcaacaggctggaagcttgctggaacaatgtatgtgggcgaagtcaaagaagctgcacagccagttctcgacttaacaatgatcatactggcagctgcgattgccataggcggaatcgcgatttattttattattaaatcgattcgaaagccactgatagagctctctgaatcggctgagaaaatcagtcagggtgatctgacccagcatattgaagttcgtacacacgatgaaatcgggaagcttgcgcagagttttaacgagatgtcagcaaagctgaaacaaatcattcaagctgttcagaattccattgaaaatgtggcctcctcttctgaagagttaacagcaagtgcaggacagaccacccaagcgactgagcatatcacatcatctattgaacagttcttaaacagcactgaacaccaaaatgatatgatcgaaaaaagctcagtccagttgaacgaaatggatcgcagcttatcccatatggtcgatacgacctcacatatgatggaatcgtcgattgattcgagcaaaacggctcaggctggtggagaactcgttcaaaaaacagcaggtcaaatgcaaaccatcgagcaggcagtgaaagaagcagagcttgttattcaaggcttagagcagaaatcaaaggatattacgaacattctgggtgtcattaacggcattgctgaccagaccaatctccttgctttaaatgctgcgatagaagccgctcgggcaggagaagcaggcagaggtttctctgttgttgcagaagaagttcgtaagctggcagagcaatcaggaagctcttcaaaggaaattgaaagcctgacaaacgagattgtggaggaaattgaaaagtcacagaaaatgtttaaacaagtagcaggtgaagtacaagctggattaaacattacagatgaaacgaaagtcagctttgagaaaatcaccgataaaacatcagaaatgacagaacaaatgaaacaaatgaacggaaccgccaaagaactctcgcatggctcaaatgatatttcacatgcggtgaatcaaatcaaagagctttcaagagaaagttccgcaggcttccaagatatcgcagcatccgcagaagaacagctggcatctatggaagagatcagctcatcctctgccacattatctcagatggcagaagagctaagagagctcattaaacaatttaaaatgtaagagatatagggaagcacctgacgttttgacgtcaggtgtttttccattcgatgcatataatttgggtgttttggacttatttagactttaataaattaaaaaagtaaacaacctagtagtacttccgatatatatactatcttactaaaaggagttttcttttttatgaaattcatacagtatttcaggaagccatctatttcaaaaaagctcgtattctctttcttatttattctcttatgcccaatcattgtattggcattctcttcatatcatacggcgagcacctccttaaatgatcaaatcatgcaaagcgccaaggagaacgtagagcagctagataaaaatattacgaaggttgtgaaagtgaaaacagacgcagccgatttttttagcaaatggatcacggagaaaaagcttaagcaaaaaggcacgacagatattcaagggcgctttgagcagttcatgagtatgaatgatgacacagaaggcatttttgtcgcttcaagtgatggcaaagtgttttcaagatatcctaataaaaaaatgcctgctgactatgtcgcaacggagcgggattggtataaagacggctgggcgaaaaacggggagctgtctgtttcagcaccgtatccaacggcttcaaccggtacgcttgtggtcacaatctctaaaaagttagaggatggatcaggagtcattgcaatgaacctagacattgcgaatctagtaaaagaatcaaatagcataaacattgggaaacaaggctatgcctttatcggaagtccggatcgtacctttgttgcccatccaacgaaaaaagctggatccaaattatctggtgaatggctagaaaagctttattcacaagatgaaggttctatgagttatatgtttgaaggaaaagaaaagcaaatggagttcaccacaaacaaagcgactggctggaaaattgtcggtacgatgtttgtgacggaagtagaagaagctgcacagccagtctttaacatggccgctatcattttagcaggcgcgctcatcattggcgggattctgatcttcttgatcatccgttccattacaaaaccactttctatacttgtctcttcctcaaggaagatcagtgagggagatttaacagaaaaaattgatgtccggtcaaaagatgaaattggacagctaggcacaagctttaatgaaatgagtgagtcattaagagatgtcattcaagctgtacaaacatctgtagaaaacgtggcttcttcatctgaagaactgacggcaagtgcaggtcaaacaacaaaagcaaccgaacatattacatcatctattgaatcattctcaaacggcaacgaaaatcaaagcgaaatggtggaacaaagtgcgtctcatttaaaacaaatgaacgaaggactgaacgaagtcgcagaaacgtctgatgtcatcacagcgtcatctattcaatcaaaaacagtagcggaatcaggcgggcagcttgtggagcaaaccgttggccaaatgaagacgatcgaccattcagtgaaagaagctgaaggggtgatcaacgggctggagcataaatcaaaagatatcacaaacatcctaggcgtgattaacggcattgcggatcaaacgaatttacttgcactcaatgctgccattgaagcagcacgtgcaggtgagtcaggcagaggcttctctgttgtcgcagaagaagtgcgtaaacttgcagttcaatcatcggattcagcaaaagagattgaaaagcttgtgaaagaaatcgtatctgaaatcgaaacatctcaaaatatgttcaaatcagtgaatgaagaagtgaagaatggtctttccattacagatcaaacgaaagaaagcttctcacaaattaatctgcaaacagcggaaatcgcaacaagaatcaatgaaatgaatacaacagtacgcgagctttcaaaaggatctgagcaaatttctaaagcggtgaatgaaattgccgatgtatcacgagagagttcagcaagcatccaagatatcgccgcatctgctgaagaacagcttgcttctatggaagagattagttcttcatctacgactctttcccaaatggcggaagaattacgtgatttaattaaaagattcaagatcagcgaataagatcaagtggttctcctcaaggggaaccgcttttctttttaagaggtcatctcgtacaatagaggaaatcgaaagaataggagagatgttatgcgtttatcagataagaaggtcattgcgtttgtcagtgatgattttgaagatttagagctatggtatccggttctgcgtttaagagaagaaggggcaactgtgcatcttgtaggagaaaaagcaaatcatgagtacatcggaaaatacggtgtgccggctgtatctgatgcagatttttattccattcaagcggatgaatatgatgctgtgcttgtccctggtggatgggcaccagataaactgcgccgttatccagaagtgttaaacattgttcgttcatttgatgcaaaggcaaaaccaatcgggcaaatttgccacgctggctgggtgctgatttcagcaggaatcctgcaaggcaaaaaagtaacaagtacacctggtattaaagatgatatgacaaatgctggagcggactggtttgatgaagcagtcgttacagatggccacctcgtctcgagcagacgtccgccggatctccctccatatgtgaaagcatttgcggatgtgttagcggcaacataaacaaaggatcccaaacaaaaaacaaagggcgaacttgcacatcatgttcgccctttgttcatcatttcatgccccattcattttgtctatcggcaggatacatcacgcccatttgttttctcgcctcgtccatgacggacatggtttgaacagataaggcaaatgtattgactggagactgccccattccttgctgaatacactcaataaaatgacagatttcataatacatggctggctgatcatctttgagagagatgtcggtttggtgtccttgacgatcatggatcgtgatacgcgaaggacggtggaattgatcaatcaccatcgtggcatcctctccttgaatttccgcagataaatgagacgttgaaattttagaatgaaaaaggagtgcttgatgcccgtcatattgtaaaaggacagagccgctcccatctacaccagaagaaagcttatagcctctcgcggtgatttgattcggcagaccaaataaatagatcgccgggtagacaagatacacaccgatatccattaaagaaccattggataattcaggcttaaaagcatttggaatctcgccatttcgataagcatcgtatcttgaggaatatttacagtaatgagcgaccacttgtcgaatgggcccgagctgatcaagatgctgtttgatttgcaggaagtttggcagaaatgtcgttttcatcgcttccattaaacacacttgatgttttttcgctgcagcaatcatctcttccacttcttttcggtgagaggcgaatggtttttcgcataaaacgtgcttttggtgctccatcatcaacatggcctgctccttatgaagggcatttgggcttgcaatatacacggcatcaaacgcatcactttccgccatttgatgtaagttcgtaaaaactgtatcaatcccgtatttttcggcaaatgcctggcctttttcagcggaccgtgaatagacggctgtacatgtaaaatcagctgctccttcaccggcctgtaagaatcgatctgtaatccagttcgttccgatgacagcaaatcgaatcatgtcattccctccttctgcttttctctgattatacatcctttgaaagcgtttgtatgaaagaacattctttttattgaagagcggatgaaacctttatataggctgatgcgtcttacataaaggatataaatgtacgtaaagtgggtagtttcttccttcattcgggtaatactctgatagaagggagaggaggaaacgaacatgaagcgcaccctgcatataggaagtacatacgtctttgcgcttttattcatagcagccggtatttttcatgtgatagagccgagcggctttgcccgtatgatgtcaggctggccatttccatatgtgatagtctatgcgactgcatgctttgaatggctgatggctgttttgctgcttctgccaaatgtcaggattgcagcagcaaaaatcatggctgtctatcttgtactcattttccctgcaaacttatttgctgcacgagagggaattccaattccaggtcaaaaaagcacagagcaggccttgctatggataaggcttattggacagccgattctcattatatgggcgatgtccattgcgaaatgggaaaaaaagctgaaacaatgaccaccatatcatgatcaggtagtgtacaatttattaataaaatagttcgagtttggaggaacgatatgaattctatgcaaatgtggagcagtcgatttaaaaaattttttcttgataacaagtttgttctctttttactcgtcctgctattaattggattgaatatccttgttttcatgaaaacatcttttattttcacaccgctcattgtactcgtcaaaaccatcgccttaccgattattttaacgggggtcgtgtattatttattaaatccgattgtcaacttgttagagaggtttagagtcaaacggatcttttcaattttgcttttatatattgtcattattggcatcattacagtgaccattgtgtctattattccttttttacaagcacaaacgatgagtctgtttcataaccttccgaaatatgttgatacggtagaagaacagattcgccaactaacgggaagcaactttattaatcaagcgcagaaagcgatgaattttaacgtctctgaattggtgagtaaagcgtcaagtcaagcgacgaagattttggaaagcacctttaccggagtggggactttcttaggggcgctcaccgaaatcatcatttcgatcgtgaccgttccgttcattctgttttatttattaaaagacggcaaaaaattacctgactatttcctgaaatttattccgaataagtttagagatcatacacatatcgtgcttcacgaaatgaaccatcgcctgagctcttatattctcggacagatcattgtcagcttctgtattggtgttcttcttttaatcggttatctgattattggacttgactatgcgttgctgctggcgatcattgcggcatgtacaagtgtggtgccttaccttggtccaacgattgcgattacaccagcgattgtgattgcgcttgtgacatcaccagtgatgcttttaaaactcatcattgtctggacagtggttcagctcattgaagggaaatttatttcacctcaggtcatggggaaaaaccttcatatccatccgatcacgattatttttgttctattaacagcaggtaaattgttcagcgtagtcggcatcattgtcgcgattccaacatatgccgtcctgaaggtcatcacgacccacttgtttgattggttcaaaatgcgatccaatttgtacaaagaagaaaaggtttaatgtcataatctttttttgaaaaaaatatagtatcataaagacgagctttcgatgaagaaagcttgtctttatgtgaacatagatggttggactgttcaaaagatcagaattgaaaggaaagaaaatcatgaatctatgggatttattcgtggcactggttttaggaattgtcgaaggattaacagagtatgcacctgtctcatctacaggtcacatgatcatagtcgatgatctatggttaaaatcaaaggaaatcattacgccagaggcggcaaacacatttaaagtcgtgattcagttaggttctattttagcagtcatgattgtgttcaaggatcgtatcttgaacttgttaggcttaaagaaaaatatcaccgaagaacaaaagcgcagcgggcataagctgaccattgctcaaattgcagtaggactcgtcccagccgtcattttaggattcttatttgaagactatattgataaatacttgtttgacgtgagaacagtcgctgtcggtttgattttaggcgcagtgttgatgcttgtcgctgactggatcaataaacgtaaaacagaaacaagctctgtcgataacatgacgtacaaacaggcgctttatatcggactgtttcaatgtttggcattatggccaggcttctctcgctcaggttcgacgattgcaggcggggttattcttggtttgaatcaccgtgctgcagctgattttacatttatcatggcgatgccgattatggcaggcgcaagcttgttaacacttgtgaaaaatgccgaatatttaacaacagacatgctgccattctttatcgtcggctttgtgagtgcatttgttgtggctctctttgttgttcgattcttcctaaaactgatcaataaaatcaaacttgtgccttttgcgatataccgaattatcctaggtgtgattttatttatcctgttcatgtaatgctgtaaactactcttataaaagagtagtttcagcgtgtagacaaaccttcgcattcgttgtcaggtctgcgcgccggtgctcacgaatgtcaaattcgctccgctccggtgctcgtccttcctagactgcaaaggttttcaaacacgctgagctgaaaagaagacaaagggctaaaataaagatcattttagccctttgtcaacaatctgaaactactcttataaaagagtagtttttttgttgtttcagctcttttaaacagtaaaatcaccctcttaattggtagaaaaagaagttttttcataatttagtgtttaagagacagaggaaggggtagtacataaatataccaattaaaggaggagttagaaataatgagaaaaacaagcaaatttgttgttagttctatgattgctacgtcaatggttgctgtccctctatctcttacgacttttggtcaaacggctgaagctgctacgacaacaggtgttgatggaagtgtctctattgatccagtagccattgccgataaaattgaacaagcagtaaaatcatctcaaaatcgtgatggatttgtaaaaaatgcggcgtacagtgccttctatgaagcaggtcaaaactataacgtagttgtccaaaacttaagccaagatcatgactttagcggactgaacaatgttgtctactatgatagtgttgaatatgatggtattacgtttggtatttgggtatttgaagatggtacgttcgtcaacaatggtgacggcggctatattaactggacatttgttggcagctttgaccgtgaggaaggaagcggcactgtcgatttccataaaagattctaatcttattgccaaaagtctgccgattcaccggcagacttttttataacgcacattcttctatgtcaaaacctaaatcttcaatgatgtgatgatccgtttggacttgctggccttttgttgttaaataatcgcctacgaaaatggaatttgccgcataaagggcaagcggctgaagcgtccgtaaattgaactctctgcctccagatactcgaatttccttggttggattgacaaatctcatgagtgctaacactttcaatgctttgatcggatgtgttcgttcttgatgctcaagcggtgttccctcgattgcatgaagaaagttgactggaatggaatccgcatcaagggctctgagcgcaaaagccatttcgacaatttgctggttggtttcacccatcccaataataacccctgagcaaggtgacatgccggactgtttgacctcctcaagggtcgacaaacgatcatgatatgtatgagttgtcgtaatgtgagcatgatgatcttgatgtgtattgatattgtgattataccgatgaacccctgcttccttcagccgcctcgctttgtcttcatttaataacccaagacatgcacacaccttcaaaggcatggtctcagtgatctcttttactgctgccgtcacctcatctaactctctgtgagaaggtgctctgccgcttgcgacaatacaataagtccccgcttttctcttgagcgcctcacgcgcgccagccacaatcgttttttgatcaagcattgtatatctttcaaccggtgcttttgaaatgatcgactgtgaacaataaccacagttttcagggcaataaccgctttttgcgttaaaaatcatatttaatttcaccttgttttgaaaaaaatgaaatcgtacttgataggctgcatgcatcatagataataattctttatcgtcagctgcaagaatgtctagaccttcttgcagcgtgatccgttcatttttcagcgctttctccgccatcgcttcccaagacaaagatatttgttttcccatcataagctcctctcattatgttaacttatttttattaaaagttaacataagagatggtcgttggcaagcattggataaatgaagtctatgaatatacatgtagacacacaaaaaggcgatgatcatgaagtcatcgccttttcatatgtaaagcaatatggcttatcgaacagtaatatagttaatcacacgttctccaagtgaattatagtaagaaaccgtcactgaaccgcgttgtacggcacgaatccaagtgaagtttggagctgtttgatctaattgaatcgcataagttgcgcccgtcacagtaatttggcttgctggaagagagacggcgatcgaagaacctacaggaagcgtacgggtcaacgtaatcactttattcataataggagcttttgctatgactggttcttttggctgtgcagctgcatgagcaccttcagtttggaagaacgtaagagcacctaaagcagctaaagacaatgtacaagctttcattaattttttcatcggtaacactcctttttttggtatatacatatattaataataatagaattatatgtcaataaaattatgtagaaaaaagagtatttatggtgaaaattgccatgtattattcatatgtcttctcttttttaggggaaaaagaggcataaaaaaaagctgggctatcccagcaatgtaaagctttatgaaaagagatcatcaatcgtcgtctcgctgttttggctgacggccttttagcttctctttttctctaatgtagtgaataaaatcgatggtttgtcttcgcgcttcttcggaaaaatcggaggcagctttaaacgcaatttgcaaatcaggatcgtttgcaaggtcggcatcagttccgcctttgtccttacctgtgagaagataatccgttgagaccccatataactcggcgattttcacaatcatctcaccgtcaggctttctcaagccatattcccaatttgcataagtggacatcgcctttaatccgagttttttagcaaccgttgacttgctccatccatgcttctctcttaattcagttaaaatctttccagtcaaattatccattggaaacaccttttttcatgttatgagtaaattttatcatgaattacacggaaaagataaataattacacaaaaagaataaaaaatgattgacttactcgtttcgtgtatattatcataatgaatataacttacacatattgagtaagaggtggaaagatgaaacttgaacatttacgagaagaacgcattttacaaggaaaaacacaaacctatatggcgaaaaagttaggatataagtatacgagcggctatgcaaatatagaaatgggcagaacgaagcctagcttagaaatcgcaaagcatattgcagatctgctgaataggggtgttcaagagcttttttttgaccaaaagttacacgaaatgagtaattctctaaaggaagagcatttcttagaaaaggggagacgaacaaaatgaatattgaacatccaatggtagcgcagatgaatgactttggatatccaaaaagctactggtcatatgacatgaaacgttatggatatcaaacagagattgaggacagtctggaggggtttgaagaagatgaaacatcagatgacgtttgatgccagaaaggaagcgcagctttgtttagtccaagctggcggctggatcacctttcatcatcagaaaccggtgtttgttttttccacagcagaagacaagcaaacatacatgaccctcttggcggaaaagttcgctgaagcaaaaaaggaggaatcaaggcgacgtgaatcgatggaagcaaattatgacaatcctcaaatgcttgctcaaagcgagtaaaaacgaacaagacatccgtcagtgggaaaaggatgacgggagatcctaacatggtcatccatttcatcattgaggcagagtttttaacaaaagatacattgataaaaagaatacgagcagctgcaaaagcacaatgcccgcataaaataaaaggcgcactatcactcgagattcgcttatttgacgacatgccgcttgacatagctgactgtcaaaacaagcgtacatacgcagaaaaaggtttgatacgcccggtgcacgtcagcatctttcagccaagactacaacatattcaagaagcacttcattctattgcggataaggtccctctacagattgtcgatttaagagtttcccagttttatagtatgcgtccaagaattgaaatcattttaaatacgataggtgatggcacgaaatcctcaccaaataaggagacaagcatatgaacgagccaaaacaattactcattcaagaaaaccagacatttgtcggtgagatggaaacaggaaaaattcaagtcatcgtgttagatgggaatgtaggaacggcttataagatggatgtacctgaacatggaaaaaccattatacaaacggcaaaaggtcattttgcaagagtagatcacgagattggttttaaaatcagctagatcactgaacaaatcacaacatcatacgtccaagacggaaagcctgcggacactgatcaagaccctatgaaaaggggactgattggtgtccgttttttattttcttaaaaaagggagagagccaatatgcaagatttacttatcgaatacaaacgggcattaaaggatgctagaaaaagatatgaaccatttagagaaaaagaagacaaacagctttcagatcaagagaagcatgataaaaaaattatcgccagtatggtcagcgatctcgaatacgtcgtggaatggcttcaaatcggtagacagccaggtgcacgcagaggattagacagacgttcagtctatcagcgcaccatcctagcaaatccagaagtgttagaggctttatcacatgaatataccctcatccaagagaatgaaagagatgtcagtgagcgggacaagaaacgaattgacgaagccttgtccgttttaacggatcgagaaaaggatgtattcttcatgcacacaacacaaggattatcgtttagtgagattgcgattatgctggatgtgaaaaaaggaactgtccaaaaacatatggagagagctcggacaaagatgtccaaaaaagtacaagaacgcctattcgaagcagctgaataggcgttttttctttacaaaataaatggagcagcgcttgtcttacagttgccacctatagttagaaagaccaaacggatgtttgctagccctacacaaatgattccttaacaggaaatcgttcgaattaaaaggaggcggcaggtgaatgtaaatgaaagataaacggataggagccaagcaagattatatgaaagggatgacgtaccagcaaattgctgatcattacaatgtctcgatccataccgtgaaatcatggaaaagacgatacggatggcaaaggcaaaaagattcgtcaaagcaggcacactcgatcttcaatcagtttctgtcagatgaaacgattgaaatcatggagaaaatgggcgggcgtacatcgcttgatttaatctgggatcaaattcaaattcaatatgctgccattattcgggcgcagcgcatcatgtatgtgtcagatcaagaggacatgatcaaagagctgaaaaaggcggcatacaagccttcttcattagaagaaacagtagaaggcattcagccagaacaagaaatcagcacagaagaatattcgtttcaattttcgtgggatcggcatgccacctttttaaatgcccaatcccgtgcaatgggagagctcaggcgtctcattaaacagtttgaagagctcgcacatgcgaaggatgaacgaagattaaggctaaagcaaattgaactgaccatcgaaaaaacaaaaaaagcagtgcgcgaagaaaaagaggaagatcttcacatcatgatcaaacggaaagaggataactcatgacgccattggttgaaaaagaagtcaatcctcattttgaacactttctattcgattggaagcaaaagtttcaatttttagtaggcggctacggctcctccaaaagctatcacattgcgttaaagctcatcttaaagctgctggaagaaaagcggacagcacttgtcattcgagaagtatatgatacgcaccgtgaatcaacattttctctattacaagagatcgtcagcgatcttggcatcgatcgtgtggtgaagtgccgaagttcgccgcttgccttgacgtttcgaaatggcagcagcatcttattcaaaggactggacaagcctgagaaattgaaatcgatcaacaacatctcgatcatttggattgaagagtgttcagaggtttcttatgaaggctttaaagagctgcttggaaggctgaggcatccgtccttaccgctttatatgatgttatcgaccaatcctgttggtcaagataattggacgtacagacatttctttcgagatgaacagctgaagcgatttgtcctagatgacgaaaccttatacaaaaagcgcaccgttgtcatcaaggatacgtactaccatcactccacagcggaagataatctatttctccctaaaagctatgtgaagcagctggatgagctgaaagaatacgacccagacctctatcgaattgcgaggaagggctattttggcatcaatggaacaaaggtttttcctcaatttgaggtgagaaatcattctgatgtattagaagcgattcagcagattgacaggccgctgaaacgagcaggcatggattttggatttgttgaatcgtacaatgcgctcattcgattagccgtcgatcatgaaaaaaagtacttatatatttactgggaatattacgaccgcgggaaaacagatgatgaaacagccgttgatctaaaagagttcattgaatcaaaggaactcatcaaagccgatgcagcagagcctaaaaccattcactattttcggcagcgtggatttcaaatggtggctgcacataaataccaaggctcacgtttgcagtatacaaaaaagatcaaacggtttaagaaaatcatttgctctgatgcttgtccgtacacaatctatgaacttcaatcactgacctataaggcagataaggatggacgtttagaggaagatacatttcaaatcgatccgcacacattatcagcgatctggtatgcgctggatgattatgaagtgacggatttgaaacagaccgcctcagagcgtgtccgtccaaacagagagaggaggtccatacaatgaaacaattgaaagcaacgattatgaaggcaaacatgtctgatcatacaaaacaaatgtatgcagatgaattttcctacgaaaaagatgacattgttccctcgccttacaacatcaatgaattaaaaagcatggcagaatattcaaccattcttcagcaatgtattgatgcgtacaaaaccaatattttaggttttgggtttggggtagaatacgcctttgactttaatgcagaaggtgtaaaaccggcaaaaaagaaagccgcagagaaggaatggacaagacttgaagagtttacgaagtacatgaactatgatgagtccgctgatgtgattcttggctatgtcctcgaagaccgagagaaaacgggcaatggttttttagaggtgctgagagatggacaaggaaagccggccggaatcgagtatttagatgcgcttcatatccgcatttgcaagcttagtgagccagtcgacgtcgaattcaggtacaccgaaaatggcgaaatgaagacaatgaatcgaaagaaacgattccgtaaatatgtacaggtaatcaacgaaaagaaagtcttcttcaaggagtatggtgatccgcgcattttgcactgtgaaacaggcaagtacgatgacactacaccagagccgcttcgcgcaacagaagtgattcattttaaaattggcagtggaacgtatgggattccccgctggattggcaacatcgtcaatatgtacggagcacgcaaggcagaggagctgaactatctttattttaaacaagggcggcatgtaccaggtgccatcattgtcgaaaatggcatgctgtcagaatcctcttatcagcagcttcaagattatatggacgatattgaaggatctgatcatgcacataaatttctattgcttgaagttgaaggtttaccgacagaaaaagggttaacgggagaagaagatgtctcaaatgtcaaagtaaacttcaaatctctagctgagatcctgcaagaagatgcgctttttttagaatacgatgaaaaaacaagaaacaaaatccgctctgcgtttcgccttccgccaatttacacaggtgagtctcaagactataacaaagcgacagcagatacagcgcgtaaaacaacagaagagcaggtatttcagccggaacggcatctcatcacaggaaaactcaatactcttttcctgccggatcttgatatttggcatgtccgttttctattaaatggtcctgattttagagacccattagagattgccaaggtactgacgccatttattcaggctggggcagtgtcacctaacgatttgcgcgatctagcaggaagaattctcggaaaaacgctagaagaatggcctgaggaactatatcaccgacctttagaaagccgcatgaaatcagctgaagaaaagtctcaaccagagccggaccagctgacgaaataaacagaagcgcgtgcacttttttgaaagggggtgaacatatgccaagagaactaaaaaacgctaaaattacgcatgtttcctacgtggacaaagcagcgaacaagaagaaattctttttgatgaaagcaaagaaaaagcggcctgactttcaaaaggaggtcagtgtcctaacaaaggctgaagatgctcatcgcctcgtgtacggtgtcgtgtatgagccgaatacacctgatgcacatcaagactttatgacagccaaggaaattgaaagagcggcacacggctttatgaaggatgcccgtcatattgacaagcagcatgattttcaggatggtgttggcgaagtggttgaatcgtatattgctccggctgatgtagaggtaggcggggagctgattcgaaaagggtcttgggtgcttgtgacaaaagcttcccaagagatttgggatcaaattcagaagggccacattacaggctattcaatggctggaacggcggacatcgtcgccatagaagaacaagatcagcttctatctcaaggcacgaatgagagagggcttttttctttgctgaaaaatttctttttaaaagaggaaggtgcaaacatgtcacaaccattttggaacgttttagaccatctgctggaaaccttacagtcaagtgatggtgatgaggcggatgtaagagctgccttagaacagctcattccaatcatgcaggatatcctgaagacagaggatgtacttcaaacgattggtgaaaggccagccgccgtacaaaaggaagatgctgctttgacgacagatcaagtacgagagctcgaaaaagcaaaaaaggccatcgaaaacgtcttacagcaggctgaacaacaagaaacagatcaaaccggggaagaacctgtccaaaaagtgctcgagcaagtcgttgcaccgattcgtcagcagctctcttccttagagaaatcagccagcagagaaaaagcagccgtgcaggaagtgcttgagcagcagcttttgcctatttcagagcggattcacatgcttgaaaaggcgcggggcatgtcaaaacaaacaatccacgatacacaaaacgacacaacaacacccatatgggatggcttactataagcctaaataaggaggaaacagtgtgagaaatcaagagttgattcgcaaggctgaaatgacacttgccagcttaaaaaccggcggtctcatgaacgcaacccaatccaacacattcattagaatgatgcaaaacacaccaaccgttttaaatgatgcacgcatcattccgatggaaagtgattcacaaaaaatcgaaaaaatcggctttggccagcgtattttgcgcccagcagaagaaggccaagcgcttgatgcaaaagaccgtgttgtcccagcgacaagcactgtccagctaaatgcgaaagaggtcattgcagagattcacatgacctacgacagtattgaaaacaatattgaaaaagacggaatccagcagacaattatgcaaatgctggctgaacgagcggcggtcgatattgaagagctcatcgtcaatggggatacgacttcatcagatccatttttagcccaaatggatggcgtgagaaaacaagcagtatctcatattgttgatgcaaatggagcggaaattagccgccaaatgtttaaacaagcctataaagcgatgccgtcaaaatatttacgtgtacctcaggatttccgtttctacacatccccaagtttagaggttgagtggaaggatcaagtagcaaaccgtcagacaaatctcggagatgcggtcattcaaggcggactttcttctgcattcggtgtgccagtcaaaggtcttgccaatatgcagccatatgacgaagcgggaacagacgtatcagatattttgctgacacaccctaaaaatattatcgtaggtttttctcgtaatattcgaattgaagtagaaaaagatattcgcagccgtaaatttattattgtcctgacagcgaagctagacagcaaatttgaggaagaggatgctgtagcaaaagtgatgaaagtgaaagagtaggtgacggcaggccatgattatttctcctgaagaactgcaagcctattctgtatttgagcgtgtgaaaaatcgatctgtagaaagactgacagcagatattatcgaagccgaagctgcggtatttcagatcgtaggtcatgatttctcaagcgaaaaatatcagccccttcctgaaaaagcaagaatcgcattattaaaaatggcccaatattttgccatgctgaatgatgacgaatctatgatgaaaggctttacgtcagaaaaaatgggtgattattcatatgcgaaggcagctgatcaagtgaaaggcaaaccttatgtatatgccctgcttgtcgattacattgaaccatcattaactggcggcagtaccaaattaaaggtgagatcattatgagttatcactctttattaacagaccgctgtgatctttttcaccttgaacatcaggaggcttcccgaggaaaattcggggttccagctgatgacttacaaatgactctttcctatcccgatgctcctagcctgacagatctggcttgttatgtaatagaaaagaatcagtcccttgtgcaagaagagccgaatacagttatttatcagtcctatcttgtccatttccctttagcaagtgatattcgcctgcatgacaaaatggtgtggaacggcgtctcacttaagttgcagcagcccaaaatagtgaaaaatcatcacattgaagtgatggcagtcaggaaggagaatctatgaaaattgatggacttgaccggctgctttcacagctggaaacagcgtgtgccggcggcttaaaagcagaatatcaagatttgttgcaagacatgggcctagagcttttggacatcattcaggacgagctaatcaaggagaatgctgtcgatacaggccggcttctaagctcctttacgcaaggagacaaggagaatcattttcttatgtcaaaaggtggtctcacgcttgaagtgggaacgcagcttgaatatgcctcctatgttaatgacggacatgctacttcttcaagtggagagcgaagatgggtgcctggcagatgggctggcagccgctttgaatatgatccgaatgcaaagacaggaatgatgcttgcctctcaatggatagatggaaatggctactgggatcatgctgtcatgctctatgagcaaatgtttgaacagtcgctggatcgaaagcttcaaagctggttcgatcgacattttgggaggtgatgaaatgaatcaagaagtcggggcaatcatgcattatatttacacacgctttcctgtgacaatgtatgatcgacttttgccagagcgttttcaagtgccatccgtttatgtgccgcccgtaacagtcatcagcggtccagatacggtatctacgtttatgaaatcttattcgctgcaagtgaaagtgtttcatatggattcagaaaaagcgcatgacgcagcagaaacaattgttgatgcattgcttgctgatcgtcaaatgattcagatgatgagtgaagatggaaaggtgcttgatgattatgtccgcataaaaagagtggaaacaagaatgatagatcaaggcgtagcagcgattgtcctgacgtgggatagcagctattggtacaaccgggacaaacaagcaagccttgaagatatcaacttttcagatggggtgatcaaacgtgagcaagactaaaaaagcagagcccgctcaaacagctggcgaagaaaaagaatttggcttttcatttgaagccttaaaagagcacagtaaggatctttttggggttaaaccagaaatccttgaaggtgctcttttttatatcaaacatcaaccaattacaaaaacagaagcgaaaaagcacattgatgcttttttgtccaaggaggtttaaaggatgaacggaggcacatttacaccaggtacagagaaaaagcgtcctggcatttactttaattttaaaacaacagcagagcagcgaattactttaggcgatcgaggtacggtggcacttcctcttgtgatgagctggggagaaccaaaaacctttatttccgtttcaaatatggaagacttaaataaaaaggttggactcaatattgatgacaagtcgcttcttcttttccgtgaagcaaagaaaaaagcacaaacggtcttgctttaccgcctaaacgaaggggagtcagccaaagctgaaatcgcagaaaactttgtggtcacagccaattatggcggtctaaaaggaaatgagatcactgtacaagtggcagaaaatgtacttgatagcacaaagcgtgacgtcatcacttatcttggaacagatattgtggataagcaggttgtcacggatgtcaaagatcttgtgaaaaacaaatatgttcaattttctggtgaaggtgaagccgtcatcacggctggtgtggcactaagcggcgggaaaaatggtgtggcaagtgtcgcagattatacagctttcctagaagcagcagaaacagaatactttgatgttattgctctcccgatcgataatagtgagcaattaaaagcgaccttcgcttcatttatcgagcgtttacgtgataagcaaggacgtaaggtgcaaggagttgtggccaactatgcagctgaccaagaaggcatcatcaatgtgacaagcggtgttgtgctggaagatggaacagaactaacgcctgatcaagcaacagcatgggtcgcaggtgcaagtgcaggtgcaaacttcaatcagtcactgacctttgtagaatacgaaggagcagtggatacattagaacgccttgataatgatcaagtagaataccgattatcacaaggggagttcctgttcacctttgatgcgagagatcgtaccgtgagtgttgaaaaagatattaactccttgacaagctttacagctgaaaagaaccagcaaatggcgaaaaacaaaatcattcgtgtgcttgatgcgatcaacaatgatttgacgttcgaattaaaaaatctgattaaattacgcaaagccaatggcaatgacattccagcatcagatgatggggtgcagcttgtgaaaacactgattactcagtatctcacacagcttcaagatggcagcggcattacaggctttaactcagaaacagatatcgtgatcggtctcaatggagatcgtgatggatttatcatcgatctagcggttcaaccagtagatgcagcagaaaaattctatttcaatgtggaggtgaagtaagatggcttttaaagcgcaaaatacaatttcaggtaaagaaggtcgtcttttcttagaaggtgaggagcttgcctttatcaaaacgtttgaagcaaacgtggagaaaaacaaatcagaagtcaatgtgatgggccgccgaatgactggtcataaaacaacaggggcaaacggaacaggaacggcaacattctataaagtcacgtcacgtttcgttcaattaatgctcaactatgtgaaaaaaggggaagacccatatttcactcttcaggctgtaattgacgataagtcatcaggccgaggcactgagcgtgtgacattatttgatgtcaactttgattcagctaaaatcgctggactggatgttgattcagaggcgcttgaagaagaagttccgtttacgttcgaggactttgatcttcctgaaaagctgaagaattctttctaattacaattgaaaaaggcattacgaatgacgaaaatatatgttatttttattttattcaacgatatggtataatttttcatagttacagagtagctacaaaagagttactgtgtaacctcaaaaagtttcttagaaatatgtttacatgcaaagtactttgcataaaataaaaagaagccaggatgcgtcaacatcccggcaatgtacaatgaggccctcaaggggctggctaatcaattagatagttttaaggatagactttcccttcaaccgtccaaagctcaaggggagtctattttttgtctatatacgtcaacagggcaacgataaatgacccgaatgcaagcattaacataagcgcttgaaatgttgacatgagcatcacccccttcctatcggggatgagccagacacccttgagcaagccattcaattgtacaaattaaattatacatgaaaagattggaaagcacattcaaaaaatggatgtgcttttttgcattcaaaaaaacataacaaagggagtttttaaacatgagcgaaaaacaaacatttgatctttcattttttatgccaggacaaacagtagaagcggaagaggtcaaagtaccgatttctaagcgttttgttgataaaaaagggaatgtcattccttttgtctttaaagccattacaactgaacgcattgatgaactggaaaaagaaaatacgaccttcaaaaatgtcaaaggcagaggccgcgtaaaggacttagacagtcagcgcttctacgcacgaattgcgattgaatcgaccatttatccagatttccgctcaaaggaattaagggaagcctacagcacacaagatccagttgaagtagcaaaacgcgtcctgtcagttggcggtgaatatgcgaactggttaaacaaagccattgaaatcaacggattcgaagacgaaattgaagatttagaagacgcagcaaaaaactaataaaagatggggataaagaagccgtgtttttatattacgccatgcacgagcttcactactccccatctgaactcctagatttatacgaatcaccaagaccgttcaaagcattcctattcggactcatcagctacaaactagacatgctagaaaaagaagcaaagaaaggagggaaataattggcgaaactcactgcacgatttgaattagaagacaaagtatcgaagaagcttatgcgcattcaaaaacgatttcaaacgtttgagaagcagctaaaaccatttagaaaaccagtgaaaataaacctggaaatagatgaaaagaagttaagaaacttcagtttatcgcttcggaaaatttcagtattttccatgagactggatcagggaatctatcgtgatttaaaagcattaaacaatcagttaaatatgctcccaaatcatctggtcatatccattcaagcgaaaggactagatgtcattaaatccagcataaaccgtttaaaacaagcgggaacaagccccattctgctgacgtttaaactaaacgatcaattgtcaggtaaaatgtcatcgatcaaaaaatctatctatcagctcatgaacagaacgtattatatgagattaaacatggttgaccaagccaccgctgcaattcaacgaatcaaaaagacactcaaaagcttgacgatgtctaaacacgaaatcagagtgtctgttcaagacaatgcaaagagtaagttgaaaaaacgagatcaggctgagtcgattgtgaaagaacaaaacataaaaaaagagcctgaggctgttagtccatcagtgaaaacagatgaatctaaacagagttggcttcaaaaccttgccaataaaggattaaatgaaattcaaaaatatgcaggtgacgttgcagacaaagtgaaggaaaaattgagtcctagaaagttttgggatgaaaaagcacttccttgggttgaaaataaaatggaagattacaaacaagatgtgatcggaagaattaaagagaagattaaatttaatcctgaagaaaaactagatcaattggtgaagactggattagatcgtctctttggtgcaagtgatcaatcaagtgaaagtgccactccagcaccaacaacagcaccaacaacagcaccaacaacagcaccaacatcaacatcaacaccatcaaatccagctcccaaaacgaaacctcagccgcgaggtggaaaaggcttgtttcgcaatagttgttgcccctgttgtgcaagaggtttaagcaggggaggatctactaaaactaaaaatagaaatggtcaatcaccaagacaatccacaaacccaaatgccacaacaagaaccgaaatgaatagaagacctccaagtagattagggaaactgaaaacaaatgcaggtaaattatttggaaaaattcctagtggactaaagaaaggtgcgggtatcgcagcttcagttggcggacttacgggtttagtgaaaggtagcaaggggttaagtggattagggaatgcgatgaagagtataggtaaagggagcggcaagttattaaagaaagtacctattctaggaagtgtacttagtgcaacaaatctaatcggtatgaacaaagagaatgctggtgaaaagattggtacgactggaggcggaatcgctggcgggatggcaggtgctgcagcaggtgcagctattggaagcgtagttccaggggtaggtacagccatcggcggtctagtaggcggcatcgctggaagtatgggtggagaatctatcggtgaaacaattggaaaatggtttgatggcggcggatttgaaaagattggccaaaaagccattgaaatcaaaaatcaaattgtcgaagtttggtcaacagttgcggcttggttcacagaaaatgtatggacaccattaagcaatacggttgtcacagtagcgtcatccatttggtcaagtttagtcaatgcatggacatggatacaagaaaccttcagtgcagttgcaggctggtttattgaaaatgtatggacaccgctaagcgatacagtcgtcacagtagcaacgaccatatggacaagtctagtcaatgcctggacatggattcaagaaacatttagtgccgtagcaggctggtttatcgaaaacgtttggacacctctcagcgacacagtcgttacggtagcaacgaccatctggtcaagtttagtgaatgcctggacatggattcaagagacatttagtgcagttgcaggttggtttattgaaaacgtttggacaccgctaagcagcacagtcgttacagtcgctacagggatttggacagcattatcaaatgcatggaaaacgatacaatcaatctttggagctgtatcgtcatggtttatggaaaatgtatggaacccacttgtagatacggtaggaaccattaaagacagtttcggtaaaaagtttgaagaagcgtataaagtcgtgacagatatatgggatggattatccaaatggtttgaggacaaaattcaaaagccgattgtaaaagtagcagaagctattagtgatgggttttctgcagcatttggttgggttaaaaagatttttgacaaagcaggcggtattgtagatgtagtcataaattggattgttgggaagaaaaaacccgataacaatgccacaggcggctatatcacccagccaaccttatcatgggtcggagaagcaggtaacgaatttgttattccaactcaaaataaccgaggacgcgggaagatgctgcttgctcaggctgcttctcatcttggaatgtctgttatgccaagcggagcagctggaaatcaagtatcaagctctccagctcctacagcagtagcttcatcatcttctgtcggttcaatagacggatctgtctcgatgactgggaacattcaagcctccagcataggcgagcaatttaataaggattttgaacaaggattaaatcaaaaagtgattacacttgatcaatggaagcaaaagaatattcagcaaccttttgctcaattgacctcagactcaggtaagtatggtcagcaaacagttgctgcttttgcgaatggtcagcaggtgacacccacaggaacagacagctttttgcaaagtcgtgtaaaagcaccataccaacaagtgatgacagcatcaccaacttggggttctggaacagttaatggttttgccacaggtcaaaatgccacatcagttggtactagccaatacgtagatcagcacatcaaacaaccattcctacaagcaaaacaagaatcaccaggctggggctcaggaatgatggatgcctttaacaacggcatgcgttcaaaagcaagtgaagtcacacaagctgccaaagaaatggcgaagaaagtagagcaggcgtttagagaggaattagacattcattccccttcacgcgtcatgatgagtcttgggaaatttgcatcgatcggtgtcgttaaagggctcgactcagtggatgtgaaaaagtttgctgaaaatcaggctggttcattaatcggagctttcagtggtatgggggtttcaggtcttagtgttcagcaatggctcatggcagctctcatggcaactggcacatcgatgaactggcttccaggtcttatgaccattgcacagcatgaatcgaatggaaatccgagagcaatcaacttatgggattccaacgctaaaaagggaacgccttctaaaggcttaatgcaaaccattggaccgacgtttaactccaataaaggcaaaggtatgaatgacatttggaacccaattcataatgctgtagccgccattaactacattaagggcagatatggaacagtcttcaatacaccgggattacgaagtatgagaagaggcgggccttataaaggctacgcaaatggtggactgattactcaggagcaggttgctagagtcggagaaggaaacaaacgcgaatggattattcctgaagaaagagggattcgagggagatatttattaacgcaggcagccaaagcacttgggatgcaagtatatgacccagcaaatgcgtctgctcctttaccagaatcacaaatgcagcaagtcacctcagctcagtcttctagtcgtacagcatcgtcaagtaataagcaaatcaccattcaattcaatggggatcagcatttccataatggacaagatcagcaatcgcttgtcgaaaaaattagacaaatgctcgtagatgaactggaagtagagcttcatacaggaacgaagggggtcgtgatcgatgggtaaatcagtgtatcaattgtggatttcccaaggaaaggacaagttacgattccctgtccttccatccgaacttgaaatcacaaataacgtacaaaatgaaacggtaaaggtcgcctcttttggagaactgacctttattgatgtcccatcggctaagcaagtatcattcacttcattatttcctaagaaatattcaccaattgctgaatataaaagcattccatcaccagagaatgcgatagcgaaaatagaacgaatgatgcgttcaaagaagtcggtgcggctcattgtaacggggacaaaaattaatatgacgtgtagcattgaaagcttcacccataaagaagggtcatatgatattggcgatcgtgaatttacgatcgagttaaaggaatacaaaaccgcatcgcctaggaaaattaaacgaaagaaaaaagcaaaacaaacgaaaaagaaaaggccttcaaaaaccccgccaaaaatgtacaccgtcaaaaaaggggatacgctatgggctatttcaggcagattttatggcgacagtacaaaatggcggcgtatttggaaggccaataaattagcgatgattaaacgtagcaaacgcaatattaagcagccggggcattggattttccctggacaaaggttaaaaataccacaataggggggctggcattgatcgagctttttgccatcagaagcggcaccatgtatgagcttgtcacagagagtgtgacacttcaggggcaaaggtatcaagcccctcgctctattcaggcaaatattatcactaaacaaggcagtcaaacatattaccgtgtctcagaaggggacacggttctttttaaatggaaaggaaaagagctgttcagaggcattgtgttttcccggacgcctgttgaagggaagctgacctttaccgcatacgacatgcttcaatatttggtgaaaaaccaagatgtctatgttttttcaaaacaaagagcagatcaaatcttgagacggataggggctgactttcaaattccaatgacctccatcgccaatacaggacatgtcataaaatcactagtgtttaaaaacgatacgagtttgtatgacatgattctgaaagcgttaaaagaaacaaagcgtcaaaccggtagaaactatcaaatctattctgctaaaggaaagatggggctgagagcttggccagatccagaggacgtatgggtcattgaatcaggcgtcaatctcattggttatcagtacagcacctcgattgaagagacagccactcgtgtcaaactgcgcacgtctgcagatgaacagggaaagaataagaaaaaaggcagcaaatcagagattgtggtggtcgaacaggataaagcaggtcagagtaaatacggtattttacagcatgttgagacagttacagggcaaatcaaccagccgcagctacaaaaaagagccaaagtacggctggcagagaaaaaaggcgtcaagcaagaaatcaaaagcatacaagcgctaggcattcctgatctgcaaagcggtcttccaatctatttaaaaatccctgaaattaacgtgaaaaaaacctactggatcgatcaagacaaacatgaattcagtggggtgaaacacacaatgacaattgatgtcgttgagaaaaattccatcccaaagggtgatcaagcgtgagattaagtgaagcgattaaacgattagcagtgaatgctgtagatgccgcctctccaattgatctggtggttggagaagtcacggcagtttctcctgtaagcatccggttaaatgaaaaccataagctagtcattccggaagaattactgatttggccaaagcgcctaaataagggtgaggatgatgaactgaaaaggggagacagcattatggtgctggcaatggcaggagggcagtccttctacatcatcgacaaattgtaagggaggtgatgaatgtggcactttcaccagaggaagaaatcgaggaaatagaagaagaggaagaggtggaaacctcgacgacgtatcgaatagatgttgaaactggcagactgacaggtgaaaccatttcaggcattgaagcaattcgtcaattcgtttatatgacactcaggacagagcggtatgcatatcctatctacagccacgacattggcactgaaattcaggaactcttgacggatacagaagccacggatgaatacaaagaaatggagattccgaggctgctagaggaagcattgattgtggacgaacggattgatcatattgaagaattagaggtcacaaagcaaaatgactcgtttcatgtcaagctagctattgtcacagatgaaggcacattagaaatagaggaggtgatggagagcgatgtttgaggaacaaacgtacgaagcattaatggaaagaatgctagacagactgccagatgacatagataaaagagaaaacagcgtcatttggaatgtcttggcacctgctgccgctgaattagcccagtcctatatttggcttgatcaagtattcgagctggtctttgcagatacagcacaaggagagtttctagatcggcgggctgctgaagtaggaattgaaagaaaaccagcgactaaagcggtatggtccgcagctattcagccggaggatatcaacatcccagctggttcacggttttttattgaagatgtctatttccaatattcgaacgatggcacgctagaatgcgagacacctggcaagatcggcaatggtcaattaacagatcagccgctgctatcacttgatacaattccaggactcgaatcgattaccatgaaagaactggtgataccaggacaagaggaagaagatgacgcttcgttatatgatcgctacttaatacgtgctaggcgggaggctgtcagtgccaacaaggcgcattataaaaaatgggctgaggaggtgacaggggttggcagagcgaaagtattcccgctttggaacggagaagggacggtcaaaattgtcatcacagacggcaatctagatgttgcatcagatctgcttgttaaaagagtacaggaatatatcgacccagtatcaggcgaaggggaaggacaagcgcctattggttcaaaagcaaccgtcgaaagcgccaaatggctggatattgacatagaagtagccgtcgaacttcaaatggactggacccttgaaggagcgcagaaagaaatagaagaaaaggtcaaagttctgttgaaatcaatcgcatttgaaaagagtaccattcgaatgtccgccttaaatgacattctgtaccattcagaaagtgtatcagattatgcaaacgtgttattgaatggggaatcgaaaaacttagtgttacaggacattgagataccgcgtctgaggcaggtgaaggttattgagcaaacaggatgaaatgaaaaactacttgccgccatattttacagagatttatgaagtagatcatctactcaaaacagaagcaccggagtttgagcaattggatgaatccattttcgatttaacggatcagttcttccctttaactgcgacatggggattgaatagatgggaaagaatgctgaaggtgcagcgagaatcaggtgactccattgaacttcgcagggcacgcttactcaatatgatgtcaaacattccaccgatcacgtatctttcattagagaaatcggtgaatcgctttctcaaaaatccaagtgccatcatccgtctcaccaccaatcgctatcatttcgccttacgtgtgaacctagatgacctgcaaaacactagatatattgtagaaatacttgaaacgttaaagccggctcatttggcttatacgttcactgcatttcatcataccgatgtacatgaaaaaaatgatcatcacgggaggctcacactgcgaagcagagtgggttttttcgatcatatcccgattttactgaatggtgaatttgtattaaatggtacgttttatcttagcgggacaagaggttcaaccgatgtacctgctcgttttcggcattcgttgaagatgagaatgccgcttcagcataagtcagaaaccacatatcgcatgaattatgtcatcactggagctgtacatgaaacagggcaaaaagcggcactgactttacgcacaaagaaccagctggcacatcaaaccaaaaagaagatgacgttccgattggcagtacatgtccaaactgaacagggcggcagcttactgatcaaggatcattactggattctcgatggatctgttccgcttgacggatcaaaaatgctagcagcaacttctcaaaaaatagagctataaggaggatcacaatggctgatcaattaaccgtaacaacattatatgcacgtcaacaaatggcaaaggcaagagcagagggaacaaaactcacaaaagtcgtcaaaatggcatttggaaacggcgggacgaaggatggcaaaccgatctcactagacggcactgaacaaaaactgaaaaaagaactcgtccaaaaagagattgattcgtttaccttcatggaaccagcaaaaatccgctacacctgcacgatcgccgaaggagaacttgcaggagaagtcatcaacgaactagcacttgtcgacgaagccggcaaattcaccgccatccgcaccatgacagacaaacaaaaagacggcgacatcgaatttgtttttgagattgatgatatttattaaagggggaatttaaatggatctaaataagccgaaaacatttgaaacgactgataaagctcatgctgatttatttaatgaaatggttcaaaccttgcttaaaaacgacaatggtctgttagaacagcttaccaaccatgcacaagatatgaactcacatgcatctgaagaagaaaagaaaaaatggaatgattcgcagatttataaaataactagagataacggtatgcagcttatcaatatctcagctgattcaaaaatatttgatgcaattaaggacaaaggtacatgtacattttactcagctcctgaagtcgaagattctccaacatcgtcaaatatatcactgagaggtatgcaaatagtaggtgaagataatattggggcaggctttgctgtagatatagcaggaaaagcatacagcttttactacaattttggtcatacgtcgattacttggacacctcttccgagtatagaagatttaaataaatggaatggcagtcagttgattaaaattacaaacgatactgggggagttcgagtatctgtagaagctgctgaaagtcttctagataaaatatccgaaacagggaaaacatttggcacattctattcaatggctggggtacaagataatccctctgaatcatctgcaagaggtttttatcattttacttcatctgatagtaataacaaaggaacctatggctgggtgattgcagtagataataagaataacatgtttacgaattatctcgatctaaatttaggctggcaaggctggaggcgtagtcttagtgaggccgataaacaaattacatggaccacacctagacttttaaacggttggaaacaatatagttcaagcgcgctacctattcgtttcggtaaaaatgctatgggagaagtggagattaatggtgctgttagagatggagcattaggtgaaattcctgtttttgtccttccggagggataccgcccgaaacaatctgtttattatgtgggggtcgcttctagccttggtacatctggggtgccacaatatcatcggacatttatttcaaatgacggaagagtatgtgtgcaattttcatctaactctgtcaaccctacagaattcattacgtttttaatcaagtttagtacattataggaggaactaaaatgtggatttataaatataatgatcaattcatttatatgcctggtgaagaaaaactcatgaatgaacatgagaaaatgcctgaaggttttaccgatgtacctcctcctgtggaatcgtatattgccaaatttgaccctgtaaaacacaaatgggaggaaaccgctacacaggagtatatcaacagtttaaaaacaaaaccaaaaccgaatgatctagaaatattaaaggagcaaaatgcctttttaaccaaacaaatggcgcagatattacgtgacataaaagggttaaaatcactttaaaactattttaaaaaattactgagtttttttgttctaatcattcatatataagggggagaaagatggttttaaaaacaccacgttcttttgagataaatgacaaagcgcatgcagatttatttaataagatgatgcagatcttgattgaaaatgatacagaactgttagctcaaattcatcatcatgcagaagatacaattcctcacgtatctgattccgaaaagaagaagtggaatgagtctcagctatataaactgacaaatgataacggatcgcatttggtcagtattcctccaggcggcagtatttatgaggaaattaaagggctaggtgcctgctcattctatgccccaggtggtgttggagtagtcgattctcctgctataggtaaagctgcattaaggggcttccagcttgtaggacaaaacaatattggtgtaggaattgcaattgacacattgggaaatatattttgtttttcttattatgtaaaagatattgcgatcaactgggtgcaaatgccaactcaaaatgaaaaaaacaaatgggatgcaggacaattgtctaaaatcacggctgacgatggaaaagcatatgaaagaattaatgcagatgatcctagtattttagataagctgataaaattgccgggtgttcactcctggtacattcatgaagcacatccagatcttccgacaagaagttccatgagggctttgtctgtctttagtgaaaatacctatggctgggtcattggtgcaaacaatacaggagatgtctatattaaccgttcaacaactgatgtaacaggtacacaacaagagtggagcggttggaaacgtctaaatgaccataacctattaaattcaaagggactaagactttcaatgtcaataggaactgatattttaacgttaccatcagggttttattttgctgtaggatctaatgttttaaatatgcctgttgataatgattcttcttggtttaatatcgatatcttagaaactgtaaatggtagaaagagcattcatgtcattagaagttatgacaacactcattggtttggtactgttcatactgacggtgtctttaaagggtggaaaaaaatagtcactgatgctgattttgaaaatgttaagtggctaaatgttaccttaggcagcggttcttctattggagatagaccagttgaatatactagatggggaaatttattattattgagaggtcacctaaaagcaaatcgagaagttatatgtggaagtattccaagtactggcttaccagataaaggcctagtagtatcagttccagtatcaggtacaacgggtcatagtaaattacttatatataagacaggagagctaaagctaactggtttactggcagcgaatgaaagtgcggtaactggctactatttagacacggtcgtcccattaaattaaggaagtgataaaaatgatactagcttatgaatacaatcatcaaaatgaattggtcagacctatcgaagtgttcgaaagggatgatgaaggcaattatatcattccagaccaatgtacaactattgcaccacccaataatccttctttttataaagctacatttgatgtggaaaaacaacaatggtatgaatcagcgacacaggagtatatagatagactaaagccagcccctctcccgtcaagtgatatagaacttttaaagaaacaaaatgctttgttatcaaaacaattaacgcagttattggctatgcagaaaggggggaaatcagaatgatgtttccaactgtagcggatatcaaacaattctgggactggcaatgttacggaccagaggacattgcattttatgtaagcattggctggatctcggcagatgactatcaagacataacaggagaaaaatacgaagcctaatggctttatttttttgctgttctctttagctggattctatcgcaatctcattgaaacaacttatgtaatggtagaaaggtgagaatacattggatataaaaattcctcgttcttttgaaacgagtgataaagctcatgctgatctattcaacgatatgctgaaaacattgcttcataacgacactggtatatcggaacaattaactaatcatatcgatgattcgagacaacactcttcagaagtagaaaaaaagaaatggaatgagtcgcagctgtataaaattacaggtgatgatggagtacatcttctaaatattcctgtcggatcaaaaatctttgactcaattaaagacaaagggacttgtacattttatgcacctagtggaatagaggatagcccttcacaatttgccattagagggattcagacagtgggacaaaataatgttggaacaggttttgcgatagatacatcaggtaatgcatattacttctactacaattctagccatatatctatcaattggactcagcttccgacaactgctgaaaaagataaatggaacaatggacagctgtataaattgactcaaaacaatggtaagcctatgtataaaggggtaagtgaaaccactgactataatgagattacagaaacaggaatgtatctcatttataatgctggtctaaatggtcctaaagagatcaaaaaggcatttatgatagtgataagttatggaaataccctactacaaactatatatgatgcaatcaatggtcttaactctttttatagaattaggaagactgactttacctggactgaatgggaaaggcaactcacatcttcaaatttaaatgctattcaagcatttcctattaccaatccagaaggatttgggaaatttcacataatcaattctgttgattttcatgacatactacctcgttataaaggttttgttcatttcacctcagacacatcagctattaacggaccaggtgttgctttacgggggatttgggtatgtaatagcgcaggaaactacggttctattattggttttgataatctcggccggacatggcgaaaaacagttgtgaatggcgtgtggtcaaaatgggaacgtttattgaccagcaacgatttaagcagtgaatggaatcaagtcactctgattaatggtacagcaaagcataatcccgtataccctctcaaattttctataatgcagaatactttatatttgagagggtcatttgaagaaatacctataaatgaaactgtgattgcccgatttgctcaaaagccttctgctactactgtattcgttggtgcgacggttgggtcgtacggagcagcacggatgacgctttctcaggacggttcacttaaatttgacggtctgtcagtgaacgatgcatcgaaagtcaaccgaatcgaaataaatgctgctatacctttatggtaggagggcttacactgctcagaaactaaagaatacattgatagcttgcaaccaaagccgctgccaccaccagaaattgatctattaaaacagcaaaatgctgatctgcttcagcaactggcagagtcagaaaagagagcagaagaacaatcaaaaacaataacagaatttgtcatgctgctgactgaaaagggggtaatttaattggattggttccgtagtatttcattgttctatcaatggaaatgttatgaaaatgaggacgtagcaaaatttgttcgtttcgagaaaattacgccggaacaatacaaagaaataacaaaagaagaatatccaataaacgctgcataggcgtgtttgtattgccttcttttaaggatgcgcaaagtgagggagtaggtgagtgtagtggaaatggatttgactcaatatttaatgacacaaggaccgtttgcggtgttgttttgttgggtgctgttttacgttttaaacacaacaaaggaaagagaaaacaagctcaatgagcaaatcgaggcgcaaaatgaagtgttagcaaagtttagtgagaagtatgacgtcgtgatcgacaaactcgataaaattgaacggaatttaaaataggaggaaaaaattatgaaaacatttgacaaaggcactgtgattcgcacagtgcttctttttattgctctcatcaatcaaacgcttgtcatgtttggacagacggtactgccgattagtgaggagcaagtacaaaccgccggtgaggcactatatgtagcaggttccaccatttttacgatggttacagccgttatcgcttggtttaaaaacaattatgtgacctacaaaggtcaattacaaaaagataccctgaaacaaagagggctaacaaaataatagttgaaggagaaacaatatggtcaatatcattcaagcctacattccaaaacacaaccgcaacagaccaggaaataggatgaagccgctctatattacggtgcataatacctctaacactgcaaaaggtgcaaatgcgggaagtcacgctgcgtttgttgcacgttcaagtactggggtcagctggcattacactgtcgacgatcaggtcatttatcagcatttaccattaaacgagaacggctggcacgcaggggatggcagaggcgatggcaatatgaaatcaatcggaattgaaatttgtgaaaatacagacggcaactttgaacaagcagtcgaaaatgctcaatggctcattcggaaactgatgggcgatttggggattcctttatcaaatgtagtgccccataaacattggagtgggaaagaatgtccaaggaaattgctcggacgatgggatcaatttaaagctggaatagccacagctcataccgacagcaaaagcacaagaaagccagtccgaacagagagcctgagccacaaagacaaagcacccgtgaccaaacagaaatcgtcaaatttgccatctggcattttaaaaataatcaagcccttgacaaaaggatctcaagtgacagccgtgcaaaaagccttatcttccctctatttttacccagacaaaggagcaaaaaacaatgggattgatggctattatggaccgaaaacggcgaatgcggtcaagcggtttcagctcatgaacggcttagcggcagacgggatatacggaccaaagacgaagaacaaaatggaacaattgctgaaaaagtgatcattcataaagtgctatcagcaggtgaagggatttttccttgctgatagctaataaaaaatgacatcatttgtgatataatcgaccgaatctatcataaggggagagtaaaatgaaaaaggaactgttccaagtcatcatgctgtcagtgctgctcatctatttcgtttatcacggaatgacgagcgattttcctgtgtcttacacaatcattctcatcacggcttatgtctctgtgatcatgtaccgaatcataaagataataaggttaagaaaaaacaaagaacaaacacaactttaagaaatatatacataaaaaaccatccttgatctctcaagaatggtttttcggatggagcatagcgggatcgaaccgctgacctctacgctgccagcgtagcgctctcccagctgagctaatgccccgaagtatgacgacataatttattataatcaatcctcctgtaaaattcaagctgtaaaacgcaaacatatcgcctatttatctttctgatcaatcggaatatagtcgaagatctcccctgattgtacagagtccgctaagcgtctcagccagtcataataggctttcgagctttcaagctgttcaagaagctgctgcgcttcctctcttacatgttcctccaactgatcatcactagcaacctcttgaagccgctcttgcgcttcttcaatcgccgctaaattgacctcgacctcccgttcccatttttgcggaaagaagttcgtgaaaaacttaaaaaagtctttttcagcaacaaagctgtgttttcttcggccccggtgaaacgtctttttgacaatattcatatcttgcagttttttcacacccgtactcatacttggcttgctcatttgcagctcttcacgcatttcatcgagcgtcatttcctcatttaaatacatggtcccatagagaatacctgcacttcgtgtaatgccatagagatccattgtttcagctatggaatcaatgactagatctttagcagctaaaatacgatcttctgcttgtggctgttcctgctttttcatcttgtccctgctttctattaagagaattcaatacgttcaaaaaaatctttatggactatatgttaacgaaagaatacaaaatgtcaaaataaatgaagcctatctccctttgacagaaaaatttgaacatgataagttaattatgttcaaaacgttaaatttttatttaacaaacttaccaaagagaatcagaggaggttccttctatgagtcaaacactatttatagatggacaatgggttggcgccaaaagtggcgacacacgggatatcatcaatccatttaatcaagaagtgatcgcgacagtcagcgaaggatcaagaaatgatgcgcagctagccatcaaagcagcgagaaaagccttcgatcaaggggactgggcaaatcagcctggacttgaaagaggaaatatggtgtttaagattgctgagttgattagacgtgatcttgatgaactagccaaattggaatcgcttgatactggtaaaacattagaggaaagcaaagcagatatggacgatattgcgaacgtgttccaatattacgcaggtctggctgacaaagatggcggggaaatcattgcgtcaccaatcccgaactcaaaaagtgaattagtcagagagccagtcggtgtatgcgggcaaatcactccttggaactatccattgcttcaagcaagctggaaaatcgctcctgctcttgcagcagggaacacaatcgttttaaaaccaagtgaaattacaccactcaccacgatcaaaatattccaactcatggaagaagcaggaattccagcaggagttgcaaacctagtccttggaccaggggcaacggttggcgatgagcttgctgtgaatgaacatgtagatttgatttcatttacaggcggtattgaaacaggcaagaaaatcatgcagggagccagtgggaatgtgaagaaaatcgcccttgagctcggcgggaaaaatccgaatattgtgtttcaagatgctgatttagacgtagcggttgaccaggcaatgaatgctgtgtttttccatgcagggcaagtatgttcagcaggttcacgtttgctagtggaagaatccattcatgatgaatttttagaagaactggtgaagcgtacgaaaaaaatcaagctaggcaacggctttgatgaagaaacccaaagcgggccgctcatctcagctgagcatcgagaaaaagtagagaaatacgtcagcattgggttagatgaaggcgcaagattagaaacaggcggaaaaagacctgacgcagaggagctttcaaatgggttcttctacttgccaacgattttctcaggctgtacgtcagagatgcggattgtccaagaagaagtctttggaccagtattgacagtcgaatccttccgaacagaggaagaagtgatcgagctggcaaatgatacgatttatggattagcaggagctgtgtggtcttctgatattggaaaagccgaaagagtggctcgtcaattaagattaggcacagtttggatcaatgatttccatccttatttcgctcaagcaccttggggtggatataagcagtcaggtcttggacgtgaattaggacgcaccggacttgaggaatatacggaactgaagcatgtatatcgaaatacgaaacctgaagcggttcattggtttaaataaatatcacacatttggaggagattctatatgacattaaatatgaaaattgaaagcatgcagaaattccacacatttgaaatcccgactgtcatcaaacatggcatcggtgcagtgaaacatgttggggaagaagtgaaagcatacggtgtcacgaaggtattgcttgtaacagacccaggtatttatcaagcgggcgtagtagacccagtggttgcttcattaaaagaagcacaaatcgatgtgatcctatttgataaagtagagccaaacccgccagtccgtttagtgaatgaaggatctgcgttatatgaaaaagaaggctgtaatggattagtcgcagtaggcggcggaagctcaatggatacagcgaaggcaatcggagtagaggcgactcacgaaggctcagtccttgattacgaagcggcagagggaaaaaaaccgcttgaaaacagaatcccacctttaaccaccattccgaccacggctggtacaggttcagaagttacgcagtgggcagtaattacggatgaagaaagagaatttaaattcaacacaggtggaccacttattgcagctcacctcacagtgattgacccagagcttcatgtatccatgcctcctcatgtgacagcaatgactggaattgatgcgcttgctcacgctatcgaatgctatacgatgaaatttgctcagcctattacagatgcggtagcgctcatggccattgaatatgctgctcattatatccgccgtgcttttgctgatggtgaggacctagaagctagatatggaatggcacaagctgcaatgcttgccgggctttcttatggaagcgagtcagctggagctgcgcatgcgatgagtcaaacactcggaggtattattcctgtagcgcatggccagtgtgtagcagcaatgatgggaccggtgatggagtataactggaaagggtatccggaaaaattcgctcgtattgcgcaagcgttcggcattgatacaagcagaatgtctacagaggaagcagcaaaagctgctgtgaactggatgtatgatttagtggaagatctagaagttccttcattagaagaacaaggtgtatcaaaagatatgattgaccgtttatctaaagaagccatgaaagatccgcaaacaattggaaacccaagagatctaaatgaaaaagcgtacaactggatttatgctcgctgttttgatctaacaccgaaaacagtgtaacaatgaaaaaaggctcccaaaagggagtcttctttatgtcttatagctgttctttaatttctttgatttgatgaatatgacgtttttcgtgtgcgccgataaaatcaagatattgcttaagggataactcttcaaacaccgggtgcgcaatgacacgtttgaaatcttcctcagtaaacgttgataaaatttgattgagctgttcacgtgctgtatcgagctcatcctttaaatgtgtaggtgtcacatgcttgcgttcaggctcaacaattctaggcgcagtggcttttctagaacggtcctctgccatttccaccggctttggctcatattccttgatcggtgctttttttccctcagcagctagatgttttgctgccatgagatccatcttctttaagtgatctgccacctcttgaatactccaagtatcatcagataatttttgattcaattgttcttcgttcaaaccttgcagcttttgccacaattcttgtcttgcctcatgtaataaactcattttcatcacctcaagatcaaattttaacatagtggtacatgacaatcattcttgagctatcggggaattcctgtgaagaattgtgaggaaatttgaaacctttacaaaagtggttcgtattacctgttagaaggaatacattggaggtgagcatggtctaaatgaaacaaaggctgttcatttcatgaagaaagggtgaggaagatggatgtgttcgggctgccgcttgagacgctgtatttatacatattgatgatatcaggaatcctgacactagttttcgtctttttcggcgatgtatttgatggattgtttgaagcgattcctgtttcattccttcaaccaacattgatcctcgcatttcttacctttttctcggctggagggtttatctctgaaaaaacagcaattgtagggagtggacttggcgcagtattatctgccatcctcgcagtggtccttgtgacctgtttgaatgtatttgtcttagtcccgctttcctctgctgaagaatctctttcatatacagaggccgacttaaaaggaagaactggggagatcattgtatctgttccaaaagacgggtttggagaagtgctgttaattagtaatagcgggaaaatctcaaagcctgccgtcagtttcgacgaagaggagattccatatggaacccgggtgctggtcgtcgaagtgaacaaaggcgtcttatcagttataccaaatgaagaaatctaggagggaatgctatgccaggaacaaccattttgattatcattggaattgtgcttgtgattcttattgcacttattggtgtatttgtttcgaaataccggacagcaggtccagatgaagcgttaattgtcacaggaagttacctaggaagtaaaaatgtccacgtggatgaaggtggaaacaagattaagattgtaagaggcggaggtacctttgtgctccctgtttttcaacaagcagagccgctcagcttactatctagcaagctagatgtttcaacgcctgaagtctataccgaacaaggtgtaccggtcatggcggacggaacggccatcattaaaattggcggatcgattgaagaaattgctactgctgcagagcaatttttaggtaaaacaaaagaagaccgcgaaaacgaagcgagagaagtactagaaggacaccttcgctccatcttaggatcaatgacagtcgaagagatttataaaaacagagaaaaattttctcaagaagtacagcgtgtcgcttctcaagatttagcgaaaatgggcctcgtcattgtgtcgttcacgatcaaagatgtccgtgataaaaatggctatttagaatcactaggtaaaccgagaattgcccaagtgaaacgcgatgcagatattgcaacagctgaagcggataaggaaacacgtatcaaacgtgccgaagcagataaagatgcgaagaaatctgagcttgagcgtgctactgaaatcgctgaagcagaaaaggtcaatgagctgaaaagagcagaattcagacgtgaacaggatacagcgaaagcaagtgccgaccaagcgtacgatcttgaaacagctcgtaaccgtcagcacgtaactgaacaagaaatgcaagtgaaaatcattgaacgtcagaagcaaattgaattggaagaaaaagagatccagcgtcgtgagcgtcaatacgattctgaagtgaaaaagaaagcagatgcggatcgttatgctgttgagcagtcagctgcggcggaaaaagcgaaacgcctcgctgaagcagatgccaagaaatacagcattgaagcaatggcaaaggcagaagctgagaaagtccgaattgacgggcttgccaaagcggaagctgatcgtgcgaaaggggaaaccgaagcagaagtcattagactgaaaggacttgcggaagccgaagccaaagagaaaatcgctgaagcattcgaacagtatggtcaggcagcaatccttgatatgattgtgaaaatgcttcctgaatatgcgaagcaagtatctgcaccactttctaacattgataaaattactgttgtggatacgggaggtaacggcgaaggcagcggtgccaataaagtcactggctatgctacaaacctcatgtccagtctgcaagaaagcctgaaagcatcctctggaattgatgtcaaagaaattattgagaacttttccggcaaaggcaatgtgaagcaaagcattcaggaactaacgaatgaaatcaaacaaccaagaaaaaaagagatcgctgatactcaaatagaagaataaaatcaatagacaccttccatcagaaggtgtctatttggcatttgcccagtatggattcctctttacatatgaagaaagattcacgagaataccagcagatatcatcatgaacactagggaggagccgccataactaataaagggaagcggaatgcctgtgattggaagaagaccaaagacagcgcctaaattaaagactacttggagcatgatttgaaacgtgagcccgatcgttaacagctttccaaaagggtcgtgtaaagcctgcacaattcgcatagcgcgatacatgatgagtagatatgcaccaatcacaaacaaaatccccatgattcccagctcttcactgatgatggccatgataaaatccgtatgggcttcaggaagaaagcctagcttttgaatgctcccgcctaagccattccctgtcagcccgcctgaattcattgcgagatacgaatgaatcagctgatatccatctccatcttcatactgaaaaggatcacgaaaagaagtcagccgcttcaaacgataaggagctgtcactgcaaaaaatgtgatacctgctgccgcagtcgatcctagcaaaatgagatggtgcgttttcagcccagcgcataataaaatgatgccgcagcttaataaaatagacacagctgtgcctaaatcaggctgctttaagatcaacaaaaaaacaagacctaaaagaatgagtggcggcagtacgccttttttaaaagatgtaatgtacgcctgttttttcgcgtacacataagcaaaatagatcaccatcactagtttcacagcttcagaaggttggagcatgagagagcccaactgaacccagcgctgggaattgtttttgacaacaccgattccaggaagcaggactaggatcaggcataacaatgacagcataacaagccaccgaatccatttacgataaatctgataagggaacagagcggcaatgaagaaaaagaatcccccaatcaggagccattgccattgtttgatgaagaaatagctgcccttttcatacttcacttctcctaaaggataactcgcactgtaaaccatcagtaaaccaaataaacagaggaacacaatcgttccaactagaatgcggtcgactcttttgagatgagatagaagaaatgtcatcatcttcaattccaattgcgcccaaacatataggatgatgacctaagattgacgctaaacacgaggccaatggcgatcatgttggtcaaaagcgcactgcccccatagctgataaaaggaagcgcgagtcccgtcacaggcattaaaccgactgtcatccctacgttttggaaaacttgaaacacgatcagcccaacgactcccgcacatatgtacaatccataaagcgtattagcatgcatagccacatgaatgattcggtaaatcatcattaagtacaaacacatcaaaagggaggcaccgataaaaccaaactcctcaccaataacggcaaatataaaatccgtatgcgcttcagggatattacctccttgtacttgatgcccctgtgtaaaaccgcttcctgataattgacctgatccaatgccgagcatcgattgtttcagctgatacccgtatgttgaatcaaattcatcaggagagagccagccataaatgcgatcaagctgatgaggcttaatgatttttgtaaaatgctcaaagtgttcattgtgcaagtagaccaaaaatgcaagaagtgtaagaaaagtagccattaatgcggccatcatcttgctagaaatccctgacacaagcatcagtgtaaaggcgatggataatatcacgagcgctgtccctaaatcaggctgaattaagatgaggaaaaaagggacaacggtccagcaaacgactttacttgtaggaatgatgctttctttaaacgaaaatcgctgatgcttgtattggttcaagacagccgctagcagcaggatcacaaaaattttcatgaactctgatggctgaactttgattgaaccgaagctgatccacctttgggatccgttttgactcgttccgaaaaaatgcacaagaataatgaggaaaataccacctgcaaataaccgaaaagataaacgctcaagcagttcataatcaaagtatgcagcagctgccatgaggccgaaaccgacgatataccagaaaatttgtcttttgacgaaataaaacatatcttgcgtttcatactgtcccgatccgctatatacagctatcaggctgatgacaaataaacaaatcacagtgaataaaagtacgaagtcaatgctgtactgttttttcatagcttcttgtcctgctacctatttgtcagctggtctatgacaattttcacagccgcagcatcatcaatatagccgatcggaaaaatataatctggtattaagtcaacaggcataatgaaataaaggagtgcgccccccatcaccattaattctcgagaagtcccccgtccggtcataaataagctgtacatgtttttcaaatgttgaaggaatggtccgacgccgcttagcgtctccatctttttctcaaaatttgccgagatcgtttcttttccctcgtttgtttggctataggcttcgtattcgtttaacttttgtttcaatttggtctgactaaatgtaccgtcgtagacgtcctgatctttcagtattttttcgatctcttctaccgcttgaatgaacgtatcaccgtgcaccttttcgcttttgactggaaacccagcagcagtcaatagttgatctaatgatatgttcagagaatctgaaagccgctgcaggtgattcaaagttggttttctttttccattcatgattcgagacagtgtcgctttatcaattcctgtgtatgtgctgagatctcttaaagatagagaacgttgttgcaatttttcctttaagagcggcccaagctcagttgtcttaaaatccatcttttacgtcatcctttgtatgatgtttcaactcttctatagaagaagtcgtacccaatataaaggtgtgttgacaaaatgtcaacgaatatcctttattgattgaattttaggaaataggaatttatcataatgaagatagggtgaaaacagtgagaaggagtggcgcggatgaaggtgaggcatgctgtacaaaaagatattcctaaaattgccaaaatacatgtgaagagctggcagacgacttatcaaggcattattaatcaggattatttggatggtttaaatatagaagatcgagaagagagctggagaagaaggtcacttgaagggacgtttgtcgcagaagatgccgagggggtatttggttttgcttcttttggaaaacaacgtgatgagcgctattcaacatatgatggagaactttacgcgatctatttattgcaagagaaacagaaatcaggagcaggtatcgctttaattgcagaaggagtgagttatttaatagagaaagggtatcagaatataatgctgtgggtatttgaacaaaattcggcaaagcatttttatcaaaagcttcaacctcattttgtcgttaccagccagttcgagctggctggcgaggaacataatgaaatagggtatgggtgggaactgtctgtattacatgaccatgtacaccgaattaaatcgtcagcttccaataataatgagagaaaaaagtgaaaagcacagctagcaaaatataagagataaaaggagaagcttctacttttccttttattcctgctatctttaaagcttcatagaaacctgccaaaaaataagcaagactgagaatataacagcacagcataatggagtaagggttcattggcgtacctccagcatgaaatcttctactattaatagattccatagagcggcaatttatgcataaaaaaataaccagctgaaatcagccagttattttttgtgaggaaaaaccaaacgagatgcacttggtatgagtatgcaaagaacgatactgcaaataataaatgaaggaaccatatatgtgctgttataaattaaagagtaaacccaacctggagttcctgttggtgcataatgagaaaagaaaacaacaccagagataaagaacgtcaacagtctaaagaaacttgcaacaaatacggataaggtaatatagaagaattgctgctttcgcttttgatcctgaatggcttttttgatcaatccagaaaatagaccgcttagggaaatgacaacagatgcgacgaaataatcgagaaatccttgaacaggtgtagcgataatagggccattcatcagctgaaggcctgcaataagcacaccaatgataaacccggttgatattccccatctaatagacataagaatgacgggtatcattatcagcgcaagagatccgccatttggcattcttaaaaatagacctgataagtaatctaatacaagtgcaagtgaagtcataattgcgatttccatcagtcgtaccaattgatttgattgctgcataaaaaaatctcctttttcatgaattgagcaaggagagaccgtgtaaggatgagtatgttattcatagaaaaacatatcgagttgaatacaccacatgtattcaattgaatccacattcctacttcagtattaactgacaggttcaaagggtcagaacaacgagtgttcactctcagcacaaagctccccctgcggttatttagttttcttctattataaatatactaaagaccttcaggatcaacaatagagaattcctgtggcaatcaatttttgtatgattatataggaagagataaggaaaaataaattatttagaaaaaatacttgtttcctctctcgaaaggtgttatatttgtattcgccgctaaaacagcgcggttattaaataacataaagaaaaaagttgttgactttatcttgatagaatgttatattaataaagtcgcctctgagagacgatgaagatgatctttgaaaactaaacaagacaaaacgtacctgttaattcgagtttttataaaaaaatcctatgatacatcataggtagtcagtcaaacatgtttatatccttccaatggaagaagttactttatcattccgcagtagctcagtggtagagctatcggctgttaaccgatcggtcgtaggttcgagtcctacctgcggagccatgcttccatagctcagtaggtagagcacttccatggtaaggaagaggtcagcggttcgagcccgcttggaagctttcctctaaattataatgattaatgtgtaaggtttctcgatgatgagaaggctttttttgtttgttttcatatatattaaattcgttcatgtttaactacaaacaagattgctatacgaatggagcaatttgcttggaagctttgcattaggtttcttcatatgccttttttcgttcttgatacttcagtgcctttttatgcttactaaagtgatgatatcctctctaacaaaagactctgtacgttcctctttcccccgaaagtgaagcattgtttatttttcctttcttcatctccaggtttggttgatcttcttttcttgttcggtatgtatataaaaaggagtagatggtttgaaagatttatttgtaaagcaagaatggtttgggcatgtgcgtcaggatgtgcttgcgggtattttagtggctctggccttaattccagaggcgattgcgttttcgattattgcgggcgttgatccgaagatcgggttgtatgcttcgttttgtattgcaattgtgatttcgtttgttggtggacggccaggtatgatttcggccgctacaggagctatggctctggtcatggttaatttggttgccgatcatggattgcaatatttgtttgcagctacgattttaacaggtctgattcaaatagtgtttggactctgccgagtgtctcgtctgatgaaatttattccgaggtccgtgatggttggttttgtgaatgcgttggctattatgatcttcatggctcagcttccacatttcgtcggagaatcaatggccatgtatatcatgacaggtggcgccttgttgattatttatttattgccgatggtgataaaggtgataccttccccactcattgcgattattgtcatgacgatcattgctgtatttggacatattgatgttagaacggttggagatatgggagagcttcctagttctttgcctgcttttctgattcctcaagtaccgtttagctgggagacacttactatcatttttccttattctttagcacttgcgatggttggtttacttgagtctcttttaactgcacagattgtcgatgatatgacggagacgtctagtcgtaagaacaaggaagcgagaggtcaagggattgctaatgtggttgcaggattctttggtggtatggctggctgtgcgatgattggtcaatcagtgattaatacgaaggcaggcgggcgtggccgtctttctacctttgtagcgggcgcatttctaatggtgctgatttttgtactcggagatgtggtggttcaaattccgatggctgctcttgtggctgtgatgattatggtctccgttgggacatttgattggagttcctttcagcagctaaaaaagaatccgaaaacagattctattgtcatgattgtcacggtcgtgactgtggtgttgactcatgatttatcaaaaggtgtgtttgcaggtgtgctgcttagtgcgatattctttgtagcaaaaatatcaaagcttcatattacctctacagaaagccaagcgggtatttgggtgtatcgaattaaagggcaaattttctttgcttctgtcactgatttcatccaagcgttccatcatgagaaagatctccaagccgttgtgattgatttgtctgaagcgcgtatatgggatgaatcaggcgtggcagcgatagaacgtgtaaaggaaaagtatcaagcagctggtgtacaggtagacgtagttggaatggatacctcgagtcgaaagcttgtgaaacaggtgaatggttcttaaaaagatctttctgtttgttacaatagaaaaggtaagaaagtgaaggatggaggtggccggcatgcttgtgcgtttgaaccaagtgctcggccggatgatgccgcttattacgcccattagtgtgttactcggtgtattattgtcggcctatttaaaggattttacgtttatggtgccctgggtatttgccatgatgacattttcagggagcttgtcatctactttttcagctttaaagcatacggtgatgcacccattgcctttgattttatcgtttatgattttacatgtgctgatgcccctttatgcctggtcagcggggcatttgatatttgcgggtgattccatgacgatcaccggtttgacgcttgcgatggtgattccaacaggtgtttctagtttaatatgggcggcgatgtataaagggaatgtcgggttaacgttatctatcattttaattgatacattgctttcgccattgattgtgccagtaagcttgtcactcttcgtcggtacacaggtccatatggacatggttgcgatcatgaaagggctgtttggtatggtggtactgccctctattttagggatgctcgttcgccagtatgcaaagccatcggtgacgaaaacaattagtcagaccctgtctcctttttcaaaattaggcttgtttgttgtcgtatcgattaacagttctgttgtcgccccatatttgcgtgaactggatgttgcattttttagcaaagcagcgactgtctttttcattgcgatgagtggatatgcttttgcatggttgattggaaaggtgatgaaatgtactcaaggggagattgtggccattgtgtatacgggcggcatgagaaatattagtgccggagctgtgcttgctattagctttttcccgcctgctgttgctgtccctgttgtgattggcatgctatttcagcaagtgcttgctgccttgtttggtttcttactcaatcgttttgagctgaaggcgcctgctgtgactaaatctttatcatgaaaagacctccatcttatgagatggaggtctttttgcgaattaatagatgagatatttcttccgtttcttttcgaacgatttgaggtcatgatgatagcgcttcatgatgtgtttgacggaagtaccttgattgatttcttctttgatccaaccatttccgatgagtttatcaaagctgcctgtttgaaggaactgaaagtcttttggatataaatcatgtattgctttgatgatggataaccctgtttttaccgcttcgaatgaagagctgtctgtgacgtatagctgcacaccgtgtgatagcttacctgcatgtttagaaaaagtgggggtgaatgatactggtctaaattgtacaccctttagttttaactgatttaaatgatctgctagttcgctgctattgatatatggagcgccaatgagctcgaacggttttgttgttcctctgccttcagagacatttgttccttcaattaatcctgtggcgggatatacaaaggtactatccactgtcggcatgttaggtgaaggaaggacgaacggcagcttcgtgtcatcaaacgtcatggaacgcttccaatttttcattttgatgactgtgacatcagcattgatatgaaactctttgttaaagaattttgctagttcaccagtggtcattccatgtcttaatggtattggatagagccctacaaatgaagcgtgctcaggttctaagacagggccttctacttttagtccgccaatggggtttggacggtctaggacaacaaagggaatgttgttttctttagcggcctccatcgcataagccatcgtgtaaatataggtgtaataacgagcaccaacatcttggatatcaaacagcaagacatctacatttttgagcatgtcaggcgtgggttttcttgtttttccatagagagagtaaacagggagacctgttttttcatcagtataggattcgacgccttctcctgcttgtgcatcgccgcgcacaccatgttctggtccatatagagcagtaagcttgatatttggatgctcaaataggagatcgacactgcttttcatatttgcatcaataccagttgggttcgtaatgaggccgacccttttcccttttaaccatgaaaggttgcctgagagtagtgtttcaatccctgttttgacggctgctttttttccttttgtatctgttcgttcttggtttgcgggggaggcggcggtcaatgtgctcataatgagaatgcttgcgagtatcaagcttgctgtttttttcaagagaatccctcctatttgatctgtttccctttcaagttgagtccatagccgaatggatacagggtttgatttggatgagtgacagatgggatatccacaggcaatttgcccttaggtgatgcagcgccaaatatcacttctaatccagcaggaatatttggctgattgaattgcccgtttgagtagcctttaaaaccgtaaacggctagtaaggcatcagcctcctcaaaatttgccgcatcgtaaggatttcttatactcatgatgaccatttttttgttttgtgctgctgcttctttcataacagcacgagggaaggcagtagcccattttttcgggtcctgtacattgtcatcaatcacaccatcattcacagctgggtcattttggacaacgtaagagccggtaatcacatagtcagcatcttgtattagtttggctgtttctttagtgaaggtcttatccgcaaacgcatatgattggatacgtacaggcttgatctttttttgtttgatcagagagtcaattgtgacagacatggcttttgtctgatcttcgtaaggtgccatgaccaagatcttgttattctttttaggcttgaatggtaaggtcttttcgttgtttttaagcagggtgatcccttcacgtgccattttttgttctgctttccggtgcgactttttcccaacgacttgagtggcttttttgatttttttctcaagggtgatgggtttcttggaagaaatgatgccgcgtttgattttcaattgaagaattttttcgacagattggttgatttgagacatcggaatttctttctttacaaccgcctgttttacagcattgaacacattctctaggtttttttctgtttttagagaggtgactggtgctggcataagggcgatgtcgacacctgccttaatagccatcaccacggcttcttcctgcccaaagttatctgcaatcgctttcatatttagggcgtctgttaccacaacaccttgaaagcccatctcttcttttaataagtgtgtgatgacttttttcgataaggttgctggaaccataatgtcctcgccatcttttttgcttttgtacgttgtgtggtcaatggcagggaattgaacatgagcggtcatgaccatatccgcaccagcgttgatggcttgttgaaacggatacagctccacttttttaagacgatctaggtcatgttctacgagcggcaagccatagtgactatcgacggctgtatcaccatgtcccgggaaatgctttagtgtggaaatggtcttttccttttgaagtcctttcatggtttgaaggccaagcctagtgacaagagcaggatcagagctaaaggaacggacaccaatgacggggttgtttggattattattcacatcaagcacaggagagaagtttgtattgatccctagtgcgtttagttctttgccgatgattttacctgtgtcgtatgcatttttcttacttctagaggcaccaatcgacatatttcctgggaaatgtgttcccttttgtaatcttgtgacgattccaccttcttgatcaattgaaatgagtaatggaatctttggtgatgctttttgaaattcatgggtgagtttgacggtttgtttcgtatcaacgacattctccgcaaataagatgacaccgcctagatgatatttttcaacaagatgggacacttctttattcatctttgttaagcttgtaggtgcagattcatcttttgtttgccaattgcgaaagtctggcatgagcatttgacctatcttttcatccagggacatgtcttgcaccatttgttttgcggttggaagaggggcagagctaaccttttccgttggaatggaagaggttagcagggccaaaaccagagtagcggggaaaagagcttttaacatcgaattcctccttttacttaaaagattcgtagattgcggtcatgatgcttccataagtaccagttgggaaaaggtcaccttcaaattgatttgggttggtttcaggtgaaacgacaggcgaatgtttcttatttgtcagcaagacgatacctagattatgttttggatcaatcaatgtcatggttccggtccagccagtatgtccataggcttcgttacttgcatattttccaaacatccattccatgtcagtatgaccgtttttacgccagcctagcccgtaagttgggtttgtatcagaagaggctgtaaagagatcgatagaagcttgatcaaagatggttttttttccatagcctcctttgttcagcatgagctggagcagcacgcccatatctgacatgttagagaaaagtccggcatgaccagagatacctgccattgagtaatatgctttctcatcgtggacttcgcctagcagggtgtacctgcgaatgttttcaaaatcaatgacaccatctcgcgaattacctaaacgttcggttgctgcaaaatgcttcggtttaaatcctttttgcagtggattgaacattgtatgtttgagacctagcggccgatagatcgtcgactctacatattgatcaagaggcatacctgtttttttctcaatgatcatgcctaacagcatgtaatcaatgtcactataaatgtgctgggtgcctggtttgtattgcagcggcaccttcggcagccatttcatcgttgtctttctatcttgagagaaaaaagagccgacggcttctttgctataaaataagacactggaagggagcccggcagaatgggtcagaagatcttttacacggagctgatctttgccggttacctttgcatctggttcatctttaaaatctggcaggatggcttgtattttttcgttcacatccagttttttctcgtagacgagcttttgcagggcatagttcgtcgcatacattttggtgttggatgctaagtcgaacagtgtattctttttcattttcttatatgatttgagttcagttgtgccttcgtatttttgcctgtagccataggctttttgatggacgatttttccgtctttgataatgatgagtgcgcctcctggaaatcctgctttgatgtcgttttgaatcatgtgatcaaccttcctaagctgcctggaagaaaaacctgcttgttccggtcgttttgccttttttaagacgggatattcttcaggtgctgttttagacaaagacgatacaggatgggagctagttgcaaatgtttgtacgggtaatccaaggagcatgagcagacttgttattaagagaaagtatttcttcaagagttagatctcctattgcttatttttcctcaaattcaacagccatatcatcatgaaaaccaaataagtatgtgaaaataaatccagcgacatatgcaataaagagtccgattaagtaaagaagcatttgatgtgtgtgaacaataaaggttaatgggagacctgatacaccaatcgccttcgttgcaatttggaagtaggcttgaaatgcgccgccgattccagcgccaagacaagcagtgagaaatggccgtcccagagggagtgtaacaccgaaaatgagtggttcaccaatgccgagcatccctgaaggaagtccacctgcgatggctcttttgagttttttcttttttgttttcatataaatggcgaatgccgcacctacctgtcctgcaccgcccatagcgagaattggcaaaagcgggtcatctccaatggaattaatgagttccatatgaattggtgtcagtccttggtgaagtcctgtcacaacaagtggaaggaaggtcgcaccaagaacaaatccagcgaagattccgcccatatttaatagataagttaatcctgaggtgatggcatccgatataaatccgccgactggcatgaagacaacgtacgtaaaaatgcctgtaatgagtagtgtgatggttggtgtgacgatgatatcaagtgattgcgggacgaagcgtctaattcgggtttccacaagtgccataaagatggcggcgagaagaacaccgatgagcccgcctctgcctggtagaatatttgtgccaaataacataatgtctgcggaggctgggttaataatgaggataccagctaatgcgcctaatgcaggagagcctccaaactcctttgcggcatttgatccgactaaaataccgagatatgcgaacaagcctgaaccaataacggttaaaatgatcgctgcttgagacttttcatcgagccagcctgcttgcacgattgctttcgtaatccctgtaataagacctgatgcaacgagtgccggaatgataggaataaagatgctggcaatccgtcgtaagaacagcttgaacggtgtgcggttcttttgtgaaatggcttgcttgtttttttgtgcttcattgtttaaatcataagagccagaggcatttagcagctgttcaaacgcacttgatacttggttgacaacacctgtacctaaaatgatttgaagcgtttctgcctcaacgacaccaatgacgccatcgagttctttaattgctgtgatgtgaacttgttcattgtcaatcggtgtaattcggagacgcgtcatacaatgtgtatgggaagagatgttttcagaaccaccacagagagaaagaatgtctttcgccaactgctgatatttcttttgatgactcatgttgaatccccctttgattttcgtttcatggagcggatggcatgtcttgtcttgtcaatatattgcgctgtctcttcatattgacgggaagctaagctgaggaacaagacatcaattaagtagagctgtgccattctagaggaagtggctgcactgcgaaaaggtgcttcattggaaccggacgtcgataggtgaacatcacttaaggcagaaacgcttgtttgaccaggatgcgttaaggcaatgattttcacttgattgtcttttgcgagctgaagggcttgaatgatgtctaacgtttctcctgaaaaggatataccgaacacgatgtcattctttcctgcatttgcgatgaccgttgatgcgatgtgcatgtcagtgaaggcagtcgctgcataattgattctgagaaatttctgctgggcatccgctgcgacgatgccagatgcaccgacgccgataaaatggatttggtttgcatgcagcagtaattgaacagctttttctaatgcttctgcatttaaaatagaagcggtgtccttaatcgattgaatcgagtttcctgctgttttttgaataatggattgaagcggttcatcttgttcgatatcacgatagccttgtttatcgtcgtgcatcaagtctccagcgattcgcatttttaaatcgtgatagccatctagcccgagagatttacaaaggcggatgacagcagagctgcttgctccggctgcctgactgatctcgtgtactgtgcttttaatgactttgtcaggatgggcaagaatatagtctgcaatgattttttcagattgggggagctttgctttcattgtgtgtagtagggtgagtccacctgctgacatgagctctgcctcctttaggattgatgatgagagatggctttgtcgatatggccattcgctttgttgagtaaatccttggctgtttttttgtctgtgtttgtttggagcatgacgatggcggttttgacttctaagtctgctgcttcaagagtcttcacggcttgttcataggaagcgtttgtcacatgttgaatgatggtgatggcgcgttcttttaatttatgattgctgacttttacatcaaccatcaggttttcatatactttaccttgtctgatcatgacagaggtggaaagcatatttaaaatcattttatgagcggatgcggctttcattcgtgttgacccagtgatggcttctggtcctacaatgacttcaatggcgcagtctgccagctcgctaatttctgcttgttcattgcagctgagggctactgtttttgcgccgatggatttagcgtagtttaaagcgccgatgatgtagggtgtcctgccgctggcggcgataccgacgaccgtatcttttgatgtcaggtgaatgtgtactaaatcctgtttgccggcttcttcactgtcttccacatcttcggcagcatgtgaaaaagcagagtcgccgcctgccatgataccgacaatcacatcaggtgagacgctataggtagggggacattcaacagcatccatcacgccaagtctgccgcttgtcccggctcctaaataaacgagtctacccccatttgaaatggattcataggcgaagtcacttgctgttttgacatgtggtaggacacggttcactgcttgagcgaccttcatatcttcttcattgatcagctggagtatttcgagcggatctgcttgtgatattcccattgtgttagggtttcttgattctgttgtcaaagaacgcaattgagatggctgcatgcgacattcctccttatttcttcattttcagtatattcagtgtgatatgaaatttcaacattatatttaaatattgaaattatatttcactcgaaacgttgtgctaactggaggtaaataattagaaaataaaaaaaataaaaatcccctttacaaaagggggacaacctgtatataataacttttgtcagcttcacggaaacagcaaacttgacaaactggcccgttggtcaagcggttaagacaccgccctttcacggcggtaacacgggttcgaatcccgtacgggtcaccatgatgtggaggattagctcagctgggagagcatctgccttacaagcagagggtcggcggttcgagcccgtcatcctccaccatatgccggtgtagctcaactggtagagcaactgacttgtaatcagtaggttgggggttcaagtcctcttgccggcactgttttttctttatcaattccatatgtggaggggtagcgaagtggctaaacgcggcggactgtaaatccgctccctccgggttcggcggttcgaatccgcccccctccaccatttttgggctatagccaagcggtaaggcaacggactttgactccgtcatgcgttggttcgaatccagctagcccagttaagacacctttttcaaaaaggtgtctttttttatgttggcagacggaatgtataactattcaaaatattgttgagttgagtcagaaggcatcgagaaagtaaaatataagcatgaacggaaaggggatgtacatatgggagatcaaaagaaggtcacgattgtcggagttccgatggatttgggtcaaatgagaaggggcgtcgatatgggaccgagtgcgattcggtgtgcaggcgtaaaagaaaaattggaatcgctttcatttggtgtggaggatctcggcgatattttggttgaacaaagagatgatgagaaaggtttatatacaagtgaaaagctaaaaaatttaacggagaatgctagtgcgaatcagctgctagctgagaaggttgacagtattgtgcaatcaggctcattcccgctcattttaggcggtgatcacagcattgcgataggaacacttgcgggggtagccaagcattatgaaaacttaggtgccatttggtatgatgcacacggtgatttaaatacagaggaaacctctccttctggaaatatacatggtatgccgcttgcagtcagtctcggtcttgggcatgctgatttaacgaacattggtggttattcccctaaattgaagcctgagaatgttgttataattggtgctcgatccttagatgaaggagagcgggcattgattagagagaaaggcattaaagtgtatacgatgcatgaaatagatcgtttagggatgacaagggtgatggaggaagccatttcatatttaaaggaaagaacagatggtgtccacctgtcgcttgatttagatggactagatccagcggagtgccctggtgtaggaactcctgtggcgggtggcattagttaccgggagagtcatcttgccatggaacttttagaggaagcgggtattttgacttcagctgaatttgttgaggtgaatccggttttggatgaaaaaaataaaacagccgaggcagctgttgcgttgattggttcgttaatgggcgaaaagctattgtagagcgggacttgttcccgttcttttttgttttggagaaatttaaggatatattaaggtttttaccggtggatatgcgtaacacgctgtcaaaaatttgttacactattttttagaggagaatgaaaccttttggaaagagattcgtatacataaagaccggtgaaggcagaggttgaatatactatggacacaatgattaaaaagagaattaagcaattgaaaaaaggcgaccagaacgcatttgcagacatcgtagacctgtataaagacaaaatttatcagctgtgctatcgtatgcttgggaatgcacacgaagcagaggatattgcacaggaggcgtttattcgtgcctatgtgaatattgaaagctttgatgtgaatcgtaagttttctacgtggctgtaccgcattgcaaccaacctgaccatcgatcgtattcgcaaaaaaaagccggattattatttagatgcagaggtggcaggaacagaaggattgaatatgtattctcaaattgctgctgatggcattttgccagaggaagaggtggtgtctcttgaattatcgagtaccattcagcaaaaaattctaagattacccgataaatatcgttcggtcatcgtattaaagtatattgatgaactctcgttaaaagaaattagcgagattctgaatatacccgttggtacggtgaaaacgagaatacacaggggtagagaggctctccggaaacagttgagagacctttgagtgaggtgattttgatgagctgtcaggaaaaaatcgtcctgcttatgcatcagtatttagacggggacattgagccccaagacgaaaaagaattaaaaagccatctgcaatcgtgtgaggagtgccgtactcattttcaacaaattgagaaatccatcgcgcttgtgcagagtacatctcatatagaagcaccatctgatttcactgcaaaggtgatggcaggtcttccaaaggaaaaaaagcgtgtgtcggttcaaagatggatcaaagctcatccgctgatggtggccgctgccctctttctcattttgatgggaggcagtctgtttacaagctggaataccgatcataatttcagtgtgtcaaaacagtcgaatctcgtcgttgtaaatgatacagtgaccgtacctaaaggggaaaccgtaaaaggtgatgtcactgtcaaaaatggcaagctgattgtagaaggcaaggttgatggaaatgtcaccgtcgtcaatggggaacagctgactgcttctgccggacaagtcactggtcaaattaatgaaattaatgaagtgtttgattggatttggtacaaaatgaaatccacagcacaaaatgtgatgcgggtcattggaccagaggagcaaaagtaatcatacgggtcgagagcagtctctttatggggctgctctttttctatattataggtcagaatgtatgcgaactagcacgccagccatatatggcaactgttttcttgctgaaacaaaatgtggtataatagccacgctatgtatttacacatagtctctttttttattaaaaatgcatcaaacgaagaataactgaaaattctggaggacgaggaaatggctttaggggatattccttttttgcagtacctcggtaatgctgttgatgttctcgttgtttggtatgtgatatataaattaatgatggtcatccgcggaacaaaagcggttcagcttttaaagggaattgtggtcattgttcttgtcaggatgggaagtgcgtatctcggtcttaacacacttcaatggctgatggatcaagcgattacgtggggattccttgcgatcattattatttttcagccagagctaaggagagcgcttgagcagcttgggcgcggccgtttcttctcaagaagcgggacacctatagaggaacagcagcagaaaacgatcgaggcaattacaaaagcaattaaatatatggcaaaacgcagaatcggcgcgctgctgacaattgagcgtgatactgggatgaatgattacatagagactggaattcctttgaatgcaaaggtgagttcagagctgctcattaatattttcattccaaatacaccgcttcatgacggtgctgtcattatgaagcgtgatgagattgcagctgcggcttgttatttaccgctgtcagaaagtccttttatctctaaggaactggggacgcgtcaccgggcggcagtcggaattagtgaagtgacagacagcttaaccgtcatcgtttctgaagagacaggcggcatttctgtcgcaagaaatggtgatctccaccgagaattgacagaagaagcgcttgaagaaatgctgattgctgaatttagtaagaacagcaaagatgcttcctcgaccaaatggtattggaggggcaagaaaaatggataagattttgaataatcgctgggccgtaaagcttcttgcattggtcttcgctttattgctgtatggtgcagtcaattcagcgcaagcgcccacgccgaaaaaaatcggtgaatcctttttcccaacatcgacgacagatgaagcaactttaaccgacattcctgttaaggcgtattatgatgacgagaagtacgtcgttactggcgtgccgcaaacagtcaatgtgacgattaaagggtcaacgagtgctgtgaaaacagcaagacaaacaaagaacttcgaaatatatgcagatatgcagaatttatccacaggtacccataaagtggagctgaaggcaagagatgtatcaaaagggctcacactatcgatcaacccatctgtgacgacggtgacgatacaagaaaaaacaacagcagaatttcctgttgaaactgaattttataatcaaaataaaatcaaagatggctattcacctgaacagcctattgtgaatccgaaaaaagtcacagtcactggttcaaaggacgtaatcgacaaaatttctgtcattaaagcatttgtgaacctagaggatgtcgatcagcaaattgaaaaggaagcgaagctcactgtgtatgatagcagcgggaatgagctgccagtcgaattgagtccgtctgtggtgaatattacagttcccatctcaagtccaagcaaaaaggttccgtttaaaatagagcggactggcagtttgccggatgggatcagtatctcaagtattgagacaagcccgagtgaggtcacagtgtacggctctcaaaaagtgctggattcgcttgattttattgatggcgtcaagctggacctaagcaagatcaaagatgatacggagattgatgccgacattcccctgccagatggtgtgaaaaaggtatcgcccgaaaccgtcaagatcaaagtgaaggttgcaacagcgcaagaaaaaaagatcgataatgtaccaatttctgtcgtaggtctgagcaaggatcttacctctgattttgtgagcccatcttctggacgactcacgttaacagcaaagggatcaaagagtgcgattgataaactaaaggcttcagatgttgaagcctatatcaatgttggggacttgaacgaaggaacacatgaggtcacaattcaagtgaacggtcctcaaaatgtgacgtggacattatcgagatcaaaggtcaaagtgaaactgacttctactgagacagaagatcagccagcgtctacgaatgatcgcaaggatccatcttctgatgacgatgatcaggatgagaagagtaaagaagaatccacgcaagaaaaagcaaagaaagaatcaagtcaaagacagcggatcaaagaagataaaaaagaggacgaagcgtcctcttgaatggtaaaaaaggagcgattgaaacatgggcaagtactttggaactgatggtgtaaggggtgtggcgaatagcgaattaacgccagagctcgcatttaaaattgggagatttggcggctatgtgctcacgaaggataaagaacgtccaaaggtactcgttggacgagacacacgtgtatccggtcatatgctagaaggagcgctcgttgcaggcttactttcaattggcgctgaagtgatgcgtctaggtgtgatctcaacacctggtgtgtcttatttaacgaaggcaatggacgcagaagcgggtgtcatgatttctgcttctcacaacccagttcaagacaacggaattaaattcttcggcggtgacggctttaagctgtctgatgaacaggagaatgaaattgagcagctgatggatcagccggtcgatcaattgccacgcccagttggagcggatcttggaacgatgaatgactactttgaaggtggtcagaaatacttgcaattcttgaagcagacagcggacgaggatttcacaggtattcacgtggcgcttgactgtgctcacggtgcaacctcttctctagcgacacatttatttgcggatttagatgctgatgtgtccacaatgggaacatcaccaaacggattgaatatcaatgatggtgtcggctcaactcatccagaggcactttctgcttttgtgaaggagaagggtgcagatattggtcttgcgtttgatggtgacggagaccgtttaattgctgtcgatgaaaaaggtgatattgtagacggcgatcaaattatgtacatatgtgcacgttatttgaagggcgaaggccgattaaaggatgacaccgtcgtgtccacggtcatgagtaacttaggtttctataaagcgctggagaaacaaggcattaagagcatccaaaccgctgttggtgaccggtatgtggtcgaagcgatgaaaaaggatggctataatgtcggtggtgagcaatcaggccacttgattttccttgattacaatacgacaggcgatggcatgctttctgcaatcatgcttgtcaatacactcaaagcaacaggaaaaacattgtcagagcttgcagctgaaatggaaaaattcccgcagcttctagtaaatgtgaaagtgtctgataaatataaagtggaagaaaatgaaaaagtaaaagcagtgattcaagaggtcgaaaaagagatgaacggtgatggccgtattcttgttcgtccatctggaacagaaccgcttgtacgcgtgatggcagaggcgaaaacaaaagagctgtgtgatgaatatgtgactcgaattaccgctgttgtgaaagaggaaatgggtatcgagtaatagatgaaagcaaatcgccagcggcggtttgcttttttttcgaataaacgtcataaatggatggatttgtacgaatcttataagcgagggcaatttgctgccttcatacataggagagcacatcaaaggtagaacatgacaagcctcatcgcatatagtgtatggaggtctcactttcttgagcgggatcacccgctaaattgtgattgacggaggtcagaccttatagtacaatcatccttgtgttactggatttttattctatcaggaaaggcagggtagatgttcagcaactctcttataattatagcgcccgaactaagcgatcggacgaaagatgcttagttgacgaggatggaggttatcgaattttcggcggatgcctcccggctgatcaaaaaagagatcacagccgtaagtgtttctttaaagcaaagaggtgactctttgtacaaagggaatacacatgatctcccaaattaaacatgtagagagggacgaagaaatgtcccttctattttagtaggctttctttgtccctttcacatgatcgggaggaagaatatttatgtgtggaatcgtaggttatattggtcagaatgatgcgaaggaaatcttattaaagggtttagagaagctagagtaccgcgggtatgactcagcaggtatcgctgtggcaaacgaagaaggcgtgcatgtgttcaaagaaaaaggacgtatcgctgagcttcgtgaagttgttgatgcaaatgtagcatcttcagctggaatcggacatacacgctgggcaacacacggtgtaccaagccatctaaatgcgcatccgcatcaaagtgcttctggccgttttacgcttgttcataacggtgtcatcgagaactatgtacaattgacacgtgaatatttacaagacgtcacactaaaaagcgacacagatacagaggttgttgttcaagttatcgaacaatttgtggacagaggtcttgatacagaggaagctttccgtcaaacgcttcttcaactaaaaggctcttacgcaattgcccttttcgataacgaaaacaaagaaacaatctatgtggcgaaaaacaaaagcccattattggttggtttcggagaagatttcaacgttgtagcttctgacgcaatggcgatgcttcaagtaacaaacgaatatgcggaattaatggataaagaaatggtcattgtcactaaagacgaggtgatcatcaaaaaccttgacggtgatatcatgacacgtccttcttatatcgctgagctagatgcaagcgacatcgagaaaggcacatatcctcactacatgttaaaagaaacggatgagcagccgcttgtcatgcgcaaaatcatccaagaatatcaagacgaaaacggcaagctgtcagtcgctggcgatatcgcaagcgcagtagcagaagcagaccgcatttacatcgtggcttgtggaacgagctaccatgcagggcttgttggtaaacaatatattgaagactgggcgaaagtacctgtagaagtccatgtagcaagtgaattctcttacaacatgccgcttctatcgaaaaaaccgttgttcatcttcctttctcaatctggggagactgcggacagccgtgctgtacttgttcaagtcaaagagcttggtcataaagcattaacgatcacaaacgtaccagggtctacgctttctcgtgaagcagacttcacattgcttcttcatgcaggaccagaaatcgcagtggcttcaacaaaagcttacacagcacaaatcgctgttcttgcgatccttgcatccgttgcagccgaattaaatggtcaatctcttgactttgatcttgtgaaagagcttgggattgtagcaaacgcaatggaagcccttgtcgatcaaaaggatgaaatggaacaaatcgctcgtgacttcttcacagtgacacgtaacgcattctttatcggaagaggacttgactactatgtgtgccttgaaggttcactgaaactaaaagagatctcttacatccaagcagaaggatttgctggtggagaactcaaacacggcacgattgctttaattgaagaaggcacaccggtcattgcccttgcaacgcaagagcacgtgaacctcagcattcgcggaaacgtcaaagaagtcgttgcacgcggagcaaacccatgtgtcatctcactgaaaggcctagaagacgaaggcgaccgtttcgtccttccagctgtacacccagcacttgcaccacttgcatctgttgtcccattacagctcatcgcttactacgcagcacttcaccgcgggtgtgatgtggataaaccacgtaaccttgcgaagagtgtgacggtggagtaggatttgctgatcctcgttagctaatttgtctaacggggatttttattttgaaagaaaacttatggttgtaaataattactttgcaataattgagatagaaaattcattgaggatttagcactatagaaaaagtgaaatttaggaaattgagggggaataggtcgtgaaattccaagcatatatcgagaacccttactttattatctttgagagttacaatcagaagatgattggtctcccatgtaatttgaattgacctaagaagatgctgattggataaaaaaacttgtttttaaaaagagtagataataagagcaatccaaatttattggtggattgctcttattttatttgccaattttcgagctaagagtggtggaactgcattaccgatttgagtaaatgatgcagttcttgatgtttcaaaatagaaattatctggaaatgtttgtattcttgctgcttctcgaacagagattgatctattttgctttgaatctggatgaatataatagtgaccatcttttgcaatatgggcaactatagtatgtgaaatagaatttccattaagagctttaaacctatctagaaatgattcagtattattatgttttattagtcttttaggtaaatcagaataaagaatattaactccatgctgtttacttgttgcaacaagtttatagatctccaaatcgtttttattgttcggtctagagaaatgctgagttaatgtagtccagttttcaggtcgtatttcagtgttgttcaagtattttgttgatgctaaagtatattcgaattgactgtatttttgacctgatttgattttaggtaaatcagaaaataattgattaattgtaatattagaattttctttagaatattcctcttcaaatcgtctgaaaaattctatatcttcatgtttataaccatatataaataatctttccctcttttgaggtacatcaaatttggaagcatctagtaatttatggtcaatttgatatccacaattttgaaaggcttcaataatttttgggagtagcggcttattgtctatatctttataagataacaatcctttgacattctcaaatatgaaaaattcagggttaaattcttctaaaaattttatataatattcatataagtaaattcttttatcattttttttctttttttcattagttgatcgccctattaaagaataagcttggcagggtggtcccccaataatgccatctaaagttgaatcctttaataaatcttttattttttctatagctaaatcaatcgtattttctccaatttctagattaataattgtattctcatcaaaaccatatttttttgcataactaattaatgtttttttatcaatgattccttttatataattttcatattgataagagtcaatagagttttttagaaggtgataacaatttcttgttattaatgtttcgcaagcaggcttacttttttctatctttgcaataacttcaaattcctcttgaataaacccttcagataaacctcctgccccagcaaataaatctaataccctcatttacttcacctctctaagaaatataccaggttaaacagaaaaaaactagactaaagtggacattaatttaaatctttcatgattaacacaatgaataaaatcaatattaatctaagtatttatttccctgatttacattttgtagtaatatttaagaagggttgtatcttccaaacctaaaatttataggaaatatatattgcatctatagattacatatattaaataaatgaaaggaaggggtttaaagtgcaagaattatctttaagaccagcagcgaggatgattacaacaatagggaaagaccttattaaagatgtccctgcatcaatagtagaattagtgaagaattcatatgatgcagatgctgaaaatattgaaattaatttctcgaaatatttagaaggagatggagagaaaatatcaatagaaataaaagatgatggacatggtatggatttagaaactataaaaaatgcatggttggttccggcaacatcaaacaaattaaaaatgcaaaaaagtagaattaagaacagacctttgcaaggaagaaaagggattgggagatatgcagtggcaattctaggaaattatttgcaattggagactgtgcacgacaagatcaaaactattgtatatgtgagatgggatgattttgagaaagaagaatatttagaagatgttcgggttgaggttgaaactttaagcgtaaaagaaccaaacggaacattactaaggattattggagataaagattattatgatttatggaatgataaagagctccacaaattagagaaagagttaaggaaattggtatcaccctttcaatatgatgttaaagaggataaattcgaaataaaatttaaaactacggatttcttagagggttctaatatttataacaactatgagacaattatagagcctcttccaatagttgatatgtataattatcgtttgtttggttttataacagaacagggcgttgcgcatctaaactttgaaaatagctcaatggatgtaaaacaacatgaagtaatcgaaccatttaaaattaatttagactctgccaaagaaaaatattgtggaaaaatagatatagacttaagagtatttgatcttgatacggctagtttagagtctttacaacaaaaacttacaaaaactgtggacttaacttttaatagaagagaagttacgtcgaagttgaaagaattgactggagtggggatatataggggtggatttagaattagacctcatggagacaaagggtttgattggcttggtttagatagtcgaagggtgcaaaatccttcattgaagataggtgtagaccagattattggttttgtttctatccaaccagaagaattttccaggctagaagaaaaaagtgctcgggacggtcttaaagaaaatttttattatggaggtcttaatagtcaagttcttgctgcattaaaagaattagaaactagaagatttgcttttagaagatctatagatcaaaaaaagagtaaaactatatataaccaaatggaaaatttatttgatttttctgaattccaaaacaaaataagtaaaagtattgagagaaaatttgacgaagtatctaagggtaaaagtaaagaagatgctacccaagaattctataagatgttcaacaaaagtttgcttgaaattaaaaaagaaaaagaaaaagagtataaagaaattaaacaaattattgctttataccaaggacaagcaacattaggtagcatcactacagtagttctccatgagggaagaaagcatactagttggcattctaatacacttcctagagtattagaatggttaaaggagtttcaaaaggagagagaagagtatctgttaaacagatcaattgatagactaggtaaggctaatgaagaaacaattgctttaatagaattatttgataagttagaccctttaactattacaaaaaaagggaaagtaacagaggttaatctttctgagatcattgaacatattgaaagagtttttcaaagtgaattgttagaaaataacatatctataataaaagatttcaaaaaaggggaagtttttttaaagggaattgaaaaagatttcagaatggtattcactaatctaatagagaatagtatacattggttaaaattggattatgaaaatgaaaatagatatattagattctctgcagaagttatagatggatctctttttattgatgtaatagataatggacctggaataaaaaaagaatttattgagaatgaagctatttttactcctggttttagtgcgaaggaatcaggtacaggtctaggtttggcgatatctggggaagctataaaaagaaacaacggaaaattgaaagctttatacgctgataagggtgcacatttaagaattgaaatggaggatattgaaattgagtaactatccaagcattgaacaaactatttcaaaagagttagaagcagagaataaatatattaacttattaataatagaagatgaaaaaggacaaatagagcagattgaagatgctattgaagattacaatagaaaaggtggagaggaaagtaatataaaaatacaaaaacaatctgttagtacctttgaaaaagcaatgtttgcccttcttaaggatgaatttgatgcagcaattgttgatattcagctagatgcaactactggtagcgaagatggagtagatttaattgagataattcttgatagattacgttttcctatattcgttcgctctggatttccagaaaaggttgtagcaattagttctgaacataattttgtgaaagtatttaagaagacagatagagtagacgatattattgaagaaattgttaaatttcataataaaggtataacaacaactataggtacaaaaggaaaggtcgaaaaatatctgaataaaatattctgggaaagattatctaaaaatttccatatgtgggatgaggattttttagataatagtgactatgaaaaatcattagtaagatattgcctagcattattacaagaacatttagaaatagaagaaaatggtggggatttttctgattatcacccttttgaggtttttatctgtccaccgataaagagtaaacctttttttggagatatattacttgatcaagatcgtaattatcatattattctttccccatcatgtgatatggcacaagaaaagtatgagaaaattattataggacaaatagagccactggatatgattgaatcttttacctcgcaccaacaaagatatttcaaaaatgaatccaacactaaaaaagaaaaagctaagaaaaaggttgttgaatttattacaaataatcataatgataaatatcactatttgccaagctatatgaaatttcctggcggattaataaattttcaaaaaatccaatctaaaacaaaagaagaaatagatgaaatggaaagattcgcttctatttctggtaaattttccaaagatattggagctagattttcaaattactttgcaaggcaagggcaaccaaatttaaatataagtttattattaaactctttattagacattgataaatagaaaaattaaatgtcatgatgtaatactgacatttgtcaattgatgtttatctaaatagattccggtttttatttattcttaatttaagcttagtgagtattttaccatcatattatatgaatagagataggtatttgataataaagataaataaattaatttaaccacccttctagcaaagtagagatatataagctacattcaagtatctgggattactgctttagaagatagtgaaataaccattggtgaggtgggggaattcatgtttaggcctcgtttatggatatttttaagacaagtggaggattggaataattacttatcttacttcatttaggtgcagggcttgagctgttgagaaccttatcccgcaaaagcttgaatctagtttaagagaaataagaaatcgatgtatccaattcttgaaaaagaaatagatttaaaatcaatgataatgtgtttaatccattattagtataacaaacaagtccagtgaataaccttcactgggcttttttatatcttatagatcattcgcccaataaaaataaaacccacttgaacgaatcccctcttcatgtcgtcaaaagaagtgatatcaaaacaaattggcgtttgaaaaggagtggggtgaatggatatgaagatgattttacctcttattttgctacaagccattttaatgataattggtttgtttgatttactgaaaagagatccatctaggatcagaggagaggtgaagtgggtttgggctttggtgattgtgttcgtggcgagtgccggtcctattgcgtatttcatttttggtcgtaaacaatcttagtaggggggatttgcttgaatatgctggagtgtcatgggctgacgaaatcgtatggtcggcatggaattttaaaaaacgtttcgttttctgttggggaagttggttgtgtcggttttttaggagccaatggagcggggaagacaacgacgattcggattttgacggggcttgctcgtcctacgtctggcgtcgtgaaggtggcgggtatggatgtgacaaaggacatggatgacatcagtcatgtgattggatattgtccgcagcagcctgcattttatcaggacatgacggggcaggagtggatgcattgggttggcgggttatttcaattagagaaaaaaatcattcgttccaaaactgaggagctgttgaagctttgccgtgtgtatgaggcgaaggatcgtgccattggcagctatagcggagggatgaagcagaggctcgccattgcacaggcgctcatcaacagcccgaaggttctgatcttggatgaacctgtgtctgcacttgatccaatgggaagaaaagacgtcctgactttgattgagcgtctaaagcatgagatgctgatctttatgtcgacccatattttagatgacattgaacgagtggcggatcatattatcatgatcaacagcggaaaaattgagatgtcctcttcgatgaaacagatcaaagaagactatatccagccagtgattgaatttcaattagaacaacagaatacgaaactagtggctatgttaaaagaacgggattgggtggaggaatgcattgagacaggagacgcttatcaggttcgagtcaaagatcagcaaacggcattgaaggagctgccttgtctgatcactgaattaggtggtgttatcctccattatcgactatctaagctgacgcttgaagatattttcatgaaggttgtgactgcatgatgatgttgaaaaaggaatttagggagttattcactagttataaaatgttgtttgtgccaatcatttttacgattttaatgatcacgcagcctattacgctcaaaatgctgccggatcttttatcgaaatcagctaatttacctgaagggtccacattttatataccagagcctagcgctggtgaggctttagcgagtgcattgagtaaattcgattcgcttggtgtttttattctcattatgattgtgatggggacgatcgctggagagcgtgcctctggggtgactgcgatgattatggtgaagccgatcagtcgaatgagttattatgtctcaaaaatatgcgcctatgctggtttgaccttgtttagtttggtggtggcggtgcttgcctccgtttattatgtggacattcaatttgggcatctggattgggtcaatgtgttaaaaggaacgcttctttattaccccaatttattgctgattgtcgtgtcgaccatttgtgcttcggcgttctttacgcgttcggtcacagccggcggtgtatcgcttgtgatcaaccttattctatttactgttccttcattttatgaggatacattagggaagtacgcacctaaaggcgtgacaagtgcggccgaggagatgattcatagagggacttattcggatcagactcttacaagctttctaggtgtatcggtattgattgttatcttttttctcattggatggtttctttttagaaaacaagaattataggttgctggaccctttggagcagctcgaattatcgttagagaatgtgaaacggaatgtagaagcggcagatatggctgtagaagaaataacgaaactagtgttttatcttgtgggagagttcgatgctgcgagtagaaaacgaatcatgagtcagtttttaggtgatcatcttccttgtatgacgatggtttatgtggtggccctggcttctcctgctcttaagatagaggtggatgcttgggcgtgtcaggagatttaataggtaaaagattgggtggttgatgctcaatctttttttgttttgtgaaattttaagtgttgtcgttcaataaattacctctatacccttatcttgttattgtctgtatggtaatatcagggtaaatgttgagtgggtctaattacatttacatgtcatcgtaaaaaacaccatagataagcatacatcactctaatacaagggagagattcgatgccattcatggaggttcagaatataagcaaacgatacagtaatggtgatgggatagagggcctgtcattttccatagaagcaggagaagttgtggcgctgcttgggccgaatggcgccgggaagacgacaacgattcggtgtttaacgggtctatataaaccagatggaggggaaattctcattgagggtttcccgcctggtcattcccatgtccaaaaacaagtagctcttattcctgatcagccgtatttgtatccagacttaacggctgctgaacatgttcaattccgtgctcgtggatatcataaaggcttaaaacagatcaaggaaaaggtatatggagcgttgaaagaagtacatatggaaaaaaagatgaacgaactgtgcggaaggctgtcaagaggccaaaagcagcgtgtcgtcttagcaggggccattgttcaagatgcctccctttttatattagatgaaccgactgtcgggttagatattccgtcaaaacagtggctgtcggattggctgagacaaaaaagcagtcaaggtgggtcggtctttgtgtcgactcatagtctggagttcgttctcgatacggccagtagggtggtattgattcgagacggtgccatcatgaagaatatggatgttcctcaattaaaggaagaacagattgagtggagggcagaagtcattcaacttctgggggagtggtcaagtgaataacacactctcccttttatggatgaaatctcaaaggcgcttgatcagtaaaaatcaagaaaagaaaatgccttttgtgatcttacttcttttcattgcggcaattggttttcagctaagcgcagtttcaagtatgggtgattggaatgccgttgcagctgggtggatcattgtctgtttgtttgttctctatacggggtttggcttgtttacaaatcggctgcctagtcaaatgaacgatatcatttggttatatggaaatggcgcttctctatggacagttgtcatcagtgtatggttatatcacattttttggcgaggggctcttcttattgtctctgctgtggctgcggattttcttctgttttttatgacgcagcagtacccgtttctgcttggaagatcactcatcctgacagggctgttatgtttggttgaaacttggatgattgcgatgtcttgtgctagaaccattcgggtatataagcgcctgctcataatcggttttgtattgatgttttgcttctttgcactgcttgttttgaatcaattcatgatgaaacagcccttcttgatgaacattgctgattctttgatgtttcaagctggacgtatgatcgaagatttctccattttttctttctgcatctttattggagtaatgttcctatcttttatgatgatgtacaaggctagtcatcgtttagagatgaaggagtctttagtcaaggaggcagtattttgggaagaatttgaggggaaacatattcaatcaagtccaatcgttcaaaaaaagggcaaaacgtggtgggggcttccgtcattaacgggcagctgggcttttctttggattgaattattgctggtaaaaaagtatgcgaccttccatttgttatctaccatgctgttaattggtacttactatgtcgtccttacttatttttctgattggctgaatctattcttaatcgtcatcgcttcatccgttctttttagttcatattatgctgggattgtaagacacgcacaaacaggagtgctctatctttttccaggcgctttatatcaaaaaatcattctgttagaagtgtttcaaaccttttggctgtatgcgttctacttgatttcactttatttggttgagattcaggatgtattgtattggaccttatttggtggaggagtttatatatggtttttggccatacggctctttgcctttatgcagcctctgagacgagaaagaagttttgctttggccgcctattatcgatcattgctatttgcgtctgtgatcagtgctgtggtcattattagcattcatctgttcactgatggcttgttgacagcaattgtatccctagtggctggagcaggattttatgtgctttgttatcgataccgtgcggttcattaaaaagaggagttgattgtcaatgaaaccagaaaataagctgtctcaatcagttcaacaattggcaaatacaaatgaagtaacgatcgttcaagcaataggggaattgagaaagttcggaaaagatgcagtgcccgtccttgttgaggctttaaaagaaaaagggtctttgcggaacattgcagcagctgtacttggtgaatttggagcagatgcgggagaagcagctgagccgctagcaaagctattagaaagtgacgaagaggatacaagaatggccgctgccatgtcactcatgaggattggacagcccagcttgccattccttctggcactggctaaacgttatgagggacctacttgtttctgggcatcatggtgtatctcttggattgatccatcaaaaattgaaaaaaacatgtacgagtgcttaaaacaagaacaagaaaatccaacaggcagcgtcactccttttgctgcagaggaagcattagggaagattattgcttttcagctaaaggaaaagggggatgaatagtggaaacgcaaaaactcatttggcctgagcaccttccgtggattcatccttcagatcaaaggaaaagttagaaaaacattcaattggttagtaagtgtaagggaggagagagtgttgtttctatcaaacaaagaattaaaaagaaacgcggtttttttcgcagggattggagcggttttgttgattttaatgatattgaaatggtttccgattcctgcagactgggagctgacgttgatttttttcggattggcgattttgttttatttgaaacgtgtgatgcggaaagaagaaaatcatcattcataattcatcagtaaaaaacctagaatgtatattctgggtttttttattaaatttaccttaaaacgcatgtttttacatgggtgtagagaccaattttttgaaagtgtggtaggataaatatgcttttatattttccgaaggagctgtcgtgttgaagggatctagggttgagttcattgatagtttgcgtggttttagtttattaggtattttgatagtgaatatgcttaattttcaatatgattatgattttgagaaaatgtttgattcgagcatatggggacaggaattcggggtatatgtgacggaaattttgttccaggggtcgttttatccgattttctcctttttgtttgggtattcttttatcaagctgattgaatccactaaggccaaggggctgaatacgaatgctattgtcgttcgccgcggctttggtcttattgtgcttgggatgctgcattacatatttatttggaatggtgacattctcatgtattacggtgcatgtatgtttttcttgctgatgtttttaagcagccggatcaaaacgatgctgatttggtcaggtgtgttaggtgccttgtcattggtggttttgccatatctgatgacctttgtttatggaaatgatgatttgttaactgatgtgtatgcgaagggtgcatacggtgatattatgttgagccggattacgattgaagacgatatgatgattgtgaccattattatggcgatcgtgaccattacgctgatgccaatcctaggttttctattcggtacgatcatggtggggccatttgcactgcttggcatggccattgggaaaaaaggtcatttgacagaagaagatcgaggcatggcttatcgtaaaggctgggttgggatgattatcatcgggctcgccttaaaatgtgcgacgttcattgatgccccttggagtgaaatggtgatgacgttaggtgcctatgttctgacgatcgggtatattcaagcctttattgttttctactattcgaaggcagcccaaggcctcaaacgtctgcttgcaggacttggccgtttgtctctatcaaactatttggcgcagtcgatcatttgtacaacgattttctattcttatggacttggtctatttggacaattggggtcaatgttgggactgctgctcgctgtcggactgtatacagcgcagctgttcatcagctatctctatttgaaaaaatggagaagaggtccggtggagtggatgatgggaaaatgggtgtattggagatgaattttgttggggaaggccgcatagctgaagagctgtgcggttttttttagttgagttgcaatcaaaaaatggttgattattctttcagtgtgtatataatgtatatatagtgtatatacaatatttcgttccgaacaccagtacagaaaaaagaggtttttatatgcagattacgatttcaaaccactctaaggagcccatttatgagcaaattacgaatcaaatcaaatcgatgattttaacgggggagctggcggaaggctcggcactgccgtctattcgaaagctggcgaaggatttgcaaattagtgtcatcacaacaaagcgagcatatgaagagttagagaaggcaggatttatttattcgattgtaggcaagggatcatttgttgcggaacaaaacctagaggtcatgagagagaaaaaattgaaggtgattgaggatcagcttggagcggttgtcacaaacggcaaggaattaggcttatcttttgatgaattgcagcagttattaaagttcttgtatgaggagtgagaagagtggagcatgtgattgaattcaaaggagtatcaaaacgattcaaggacttttcagttaagagtctcgatttgcaggtcaagaaaggctttgttacagggtttattggagaaaatggagctggtaagtcgaccaccattaaaatgatcatgaatttgttaaaaccagattcaggtgaggtcaagattttcggattagattatcacacccatgaaaaagagattaaggaacgaatcggctttgtttacgatgccaacgtttttttcccaggtttgaatttaaaagacattaaacggattgtggcacctgcttataaacgctgggatgaccgtcttttccatcaatatattgaacagtttggcctgcccctgcataaagcaatcaaaacattctcaaaagggatgcagatgaaggcgtcacttgcgattgcgctatcacatcatgcagagctgattatcatggatgagccaacagccggtttagacccagtttttagaagagagctgttaggaacgttacaagagttaatgattgatgagaaccggaccatatttttctcaacacatatgacaacagatttagaccggattgcggattatattgcgtttatacaaaatggacaattggtctttcaacagtcggttcatgatgtagcggagaattatgcgcttgtgaagggaagcctggatttgttggatcgagacacagaaaaggcttttgtccatattcagcgtacagcagcagggtttgaagcattaacagatcggatcggtgaagtgaatcatatttttggagacgctgttgtgatcgaaccggcgtcgcttgaggatatcatgttttatttgaaaggcggggtggcgcatgtttcatttaatgaagcgtgatgtgattttgcagaaaaagcagctgattatttttcttccgtttatcttattttttattctcatggatgcgcatccggcattgatttttctagtcgctagtttcttcataccttttaacacatatgcgtacgatgagaaggcagaaacgaatattctattaaactctttgccttatacacgtaaagaaattatcgcatcacgttatcttggtgccgttttctatatgattatcgcaatcgggctgacaagtgctgctttatttgtttttgggaagctgttttcgctgacggatattgcgattggcagcgggctgtttttattgtttgcggcgtgtacgtttccattgttttatatcttgaagcctggctatatcacaacggcagtgattattggctttatccttttatctggtataggaccgccatttgttgcctatttagcggagcaattcagtgggatcacagattttatcatgaaattatcgatacctattttatatactgggtcagctgtgctgattatgcttatctacctgctgtcttgggggctttctactgctatttatcagaggaaagtgttctaggaaaaatagctgaatctattcaaagtagatcatgaccgcaattatgaccaagtagaggtgagcgagatgatgtatagtctgtcacgcaagaggcgattttctattttgagtcgcatttgatggatgagctgtattaaggcaggtgcctgaaatagtgggatattctcattttcatttcaatatgcgattgttttagatatcccttctcacagtgaatccattcattttggtgtcttgctcagcggcaagggaacggtatgggcagatgggtttcgatttgaggaagtgaatgagaagacacctacaaccaatatggtggaggattctgcattgccagatgttccagtgaatttacagtttgagcttgaggagaccgtgtgagcggtcttttttatttattttatataaagaacctatattgacagtttatcatgaagtagattaaaatacataccaacggtcggtatgtaagaggaggcgtttcatttggccagaaataagtatccagaaaagacaatcaagcaaattttagatgtgtcgacgaagctgtttcaggaaaaaggatttgaaaagacgagtttgcaggatatcatccatgaattgaacatgtctaagggtgctatttatcatcatttcaaatcgaaggaagaaatattacgtgccgtgatggatcggcaatttcgtcatgcgacagagaagcttgaagatctgattgagcatacagaggcagttcatgcaaaagagaagctgcagcttattttagagaagcttgtggcagatccacagtctcactcaattgatggaatcttagttgatcagatcaaaaacccgcagtttgtggtggaagggatgaaggcaggagtaaatcaggatgcgcttaaaattaaaaggctcattctagaaggaattgatgatggttcgatgaagactgcttttcctggtgaagtggcagaagtgtttatgcttctcgtgaatatatggctgaatccaacactatttgctcgtgatgagcaggaaactagtcagcgtttgctgtttttacaacagatgatgaaagggcttggagtggatgtagtgagtgatctatttattcaaaaggtcacagcgcattatgctggaattggtggatatgatcagcctggaacctaaatggtcagataaaagacaaaaagaaaaattcatttcataggaggatgccttatgcttcacttcataaaacttgagctaagaaaaagccatatgaaacattatattcaatctagtatgattgcaagcattgtactgctggtgtttatttattttgtcgcgtttgttgcacaggttgaacaggaaataggttttcagcaatatccgaatatctatttgttgaccagtatagtatggatgatctttttttcgatcgtcacagccttgatgtattgtcgagtgatggtgactgcattgaaagagcatgaacctcattcatcaagtctgaaagcatcactcctttcgagaatggtctggatgctgtgcttttctacgattgcaatgctgtgtagcatcattccctcatttgttgtgtttagtgtcactgaaacgttcttcccccttgttcaggatgcgctgacagctgatgtgatgttcactgtgatcaaaacgtacctggtgtttacttgttgtatcaacggtattggcatgattgcgatgagagtggggttaatgaagaaatctacctccatgaccattctgactgcgattgttctatgtgctgttttaggaaacctattaattgctttttatggaaatgatcaaatgaatttcattctgtcaggagtcatgatcgcagccgttctcattgtgatcttggaattatggggcagtatcatccggcttcaagagagatgagccgcgttgaaaaaaggagggggacattgtggagcatacggttcgaattgaagaatcggtcgtagaattatcgctggattggctattgggagaggtgcgtattcatcatcatgatcatccttatctattcattcgtcaaacgaccaatcaagcttttccccaacgttatttgctgcatcatcaggtaagagatggacggctggtcattcaagatagacgaaaaaaaatactcagcttagggcttcacctttataaaaccgatgtagctatttatcttcctaaacaagaattacagtccatatctcttcgttgtaaaggaacaaatcttcaggcagagaggctgaaggtggaaaatgtctcttgtcatttaacttctggaaagacgatgctatcaggtgaaatcaaacatctccatttagagacagtaggtggacttatttctagtcggcagctggtcgcgcagagattattactgcacgccacatcgtcaaaagttgagttgacgggtgctttttcggacgttgatctgcatgtaacaggtagaaggatgcagattcattctactaagatgctagattcacttaaatctacttcaacaggagcatatgtcaaagtggagataccggaaaatgatgggtttacttgttatgtaaagaaaagatccggtgcttttcggaatgacttttcttgtcatctagagaagggcaaaatggtgcataaaaatggactacgatccttagagattgatataagaggcggtcagtttctaataagtcataagcattgaagtgactttcactcgttgattcaatatatcaatataaaacaatttgaatctcttttatcgtcggaatattttgataatagtgttttcctcaaaaaaacaattgttttttaagggtagatttattatgataatatacatcgaaagattgatgtttctcaatcagaatgaacattctgatttttattttttatgttgtttgttgatgagggggaagaaaagtggctcaaaaggaattaaagagagggttaagtgcccgccatattcaaatgatcgcactcggcggcacgattggtgttggcttatttatggggtcagctaaggccattcaatggacaggtccatcggttcttctcgcgtacgcagtatgtggtatctttatcttttttattatgcgtgcgatgggagaaatgttatacgttgaaccgagtacaggttcatttgctacatttggtcatcaatatattcatccgcttgcgggttatatgacagcttggagtaactggttccagtgggtcattgtcgggatgtcggaaattattgcagtaggcgcttatatgaaatattggttcccagacctgccagcgtggattccaggtttaattgcgatgattattttgggagcggcgaatttgatttccgttaaatcgttcggtgagttcgaattttggtttgcaatgatcaagattgtgacgattattttaatgatcattgcaggtctaggcattattttctttggatttggaaatggcgggacgcctattggcttgtctaatctgtgggcgcacggcgggttctttacaggtggatttagcggattcttgtttgcgttgtcactcgtcattgctgcctatcagggtgtagagctgattgggattacagcaggtgaagcgcaaaatccagaaaagacgctgaccaatgccatcaaaagtatcatctggcgtattttgattttctatatcggtgcgatctttatcattgtgacagtgtatccttgggatcagctgaatacccttggcagtccatttgtggcgacgtttgcgaaaattgggattacagcagctgctggtattattaactttgtcgtcattacagcagcgatgtcaggctgtaatagtgggattttcagtgcgggacgtatgctttatacattaggtgtgaatggacaggcgcctgctttcttcaccaaaatttcgaagaatggcgtgccgtattttgggacatttgctgtgctgattggcttagcgataggagttgtcctcaattatgttgcgccaccaaacattttcgtctatgtgtatagtgcgagtgtacttcctggtatggtgccttggtttgtgattttgattagtcatatcggctttagaaaggcgaagggatctgcgcttgatcaacatccattcaagatgccgctagcgccgttttctaattatcttacaatcggtttcttactgatggtgcttgtatttatgctcattaatcaggatacgcgtatttctctaatcgtggccattgggttcttgattgtagtagcgcttagcttctatgtctttgggatcgggaaacggaaaccgatcgaaacagcttcttctgatcaaacggtaaaataatcaaaggccttgcgggatggaccgcaaggctttttttgtttagagtgaagctttcacacggttaaagacatctggaaagttggtgaaaagaccggtgacgccgtattgcagtaaacgggtcatgtctgcttcgttgtttaccgtatatgggtggaggaggagtccgtggcttctgacctgctgtacgttttcaggtgtcaatgctctaaagtttggcccgacacccactgcataagttttgatgaagtcgagctgatcgtctgtgatggacgtcatttgggttctgtctaatagctgtacttttggaaggcgtggagctagtttctgtagttttagcaggctgtcttgactaaaggattggatgatgacctgcccttttctcgtatgttttccgagaagatgatgtttctttaaggcgtccaatagtttctcttccatttgcggataaaggtccggtttttttgtttcaatataataattctctcgtttgccgaaatagcgcagcacctcatctaatgtgagtactcgctgtccgatatagttggcattttgtctgtcgggattgacttcgttaaaccatgtaccggcatcaagctgtttgatttcggcaagtgtgaggtctttgacccagcctgttccgtttgtggtccggtcaacggtttcatcgtgcatgacgatgaggtgtccatcctttgtcatttgaaggtcgagttcgaggtaatccacattcatctttgtggcgagtttgtaggaagccagggtatgctctggtgcataccctgatgctccgcggtgtgcaacggttaaaatacgatctggagataaaagatgttcatgtgccgatatggtggtcggcacccacgcaaaagacagtaaagcaaaagagagcaacacgaaagcaagtaatctacttttcttcatattttatcctccttttacggtaactgccttcatcataagaaatagatgtaaagggcatgttgggtggatatgaatcttttatgtgattttcattaagcttgctctacgcgcttcccagtattccatgtcatcgccaagaagacaatcgcaagcacacaagaaccaaccagtaaaatgaaacctcctgtccagtcatagtgatctacgacgacgcccatcatcgcattggcaaaggcagagccgccaatatagccaaagaagccagtgagtccggccgcagtgccagccgcttttttaggagcaaggtcaatggcttgaagtccaatgagcatgacaggtccgtaaattaaaaagccgatgctgatgagggcaatgttatcgaccattggattgccagcaggatttagccagtaaacgagcaccgcaattaataccccagccataaagaggacgcccgctggtgcacggcggcttctaaagaatcggtcgctgatccagccgcacaacaatgtccccggaatgcctgcatattcataaagaaaataagaccagcgtgaatgctctggtgaaaagccctttgcttctgttaagtaggtcggcgcccaatcaaccacaccgtaacggacgaagtacacaaagacattggcaatggcgatataccaaaggaatttattgttgagtacatacttaaataaaatctctttcactgttaattctttttcttgatcttcatactgctgtgccggatagtcattgcgatattcctcgattggcggaagaccagcggattgcggagtatcccggacgagtagaatgatcacgaaggagacgataatggcaatgatggcagggaagaaaaagatacttttccatgtcgcaaacagcacgatccctaaggtgatgagcggtgcaagaatccccccgccgatattgtgagcaacgttccaaatggacattttcgttccacgttcactaaccgaaaaccaatgcgccatcgtgcgtccgcatggcggccaccccatgccttggaaccagccgtttaaaaacatgaataagaacatgatccatacacttgacgtcacccatggaaatgagacaaataggatattgataagggctgatagaaagagtccggtggctaaaaagtatcttgggttacagcggtctgagatcatccccatgatgaatttactaaagccataagcgatagagacagctgcgagtacaaagcctaattcacttttcgtgaacccttcttcctgtagataaggaatggcaaaagcgaaatttttgcgcagcaaatagtagcccgcatacccgataaagatgcctaaaaagacttgcagccgcagccgcttataggtctcatctgttttggcatcatcgagcctgtcgatatgcggagcgggtttaaaccatttgaacataaagatcctcctcttgtcgttatccgattgactgaagcaaaagtacgagatcggcgtttgatcttgtactttttaagagacaaaagaattgatagcgctttcttttgtactcccatcatatcggatggaagagacgtttatgatgaggcttttgtcataattttggaaaaacagttcatcaagtaacgaaaaaaaatccgcacaatggcggatttttcttagctgttacagagatacattaattttcgcagatttctttagtttttcaatttctttttgtacttctttctgcttttcttgagattctagctgttttttaatttgtgatttaacctctttgtattcaggtgctttttgcttttgttttttcatttcatcagcgtattgatcatagtacgctttgacgtccttttcagagacggaggctgatttgatttctttgtcgacatattggctgtatttgatgctgtcggcaatgtcacttttcagctgatccatggtgagtccgcttttcttaagagcttcttcaaattgagcgttgtctttgaattgtttcttttcttcttttagctgtttatctacctgcttgtcagaggctttgatgccctttttctcagcatcttgcaggatgagctcttgacctacgagcgcatcaatggtttgtttcttgactgcttttgcgccttctttagatgttgggtcttgccctgattgctgaagctgtccttgaatggtcgataaagcgctattatattcattacctgtgattttgtcttggttgacggtcgccacgaccttttgatcatcgattttttgtgcgtctaatttcttttgcatctcttccatttgcttttgctgttctttttggtcagcctgtgttgtttccttgcttttggctgaatcgttttgcttatcttgtttggcatcgtttgacgagcaggctgcaagcccaacagataacagacaagcgatgagtgtgtatgatacctttttcatcattttctctcccttcggtatgagaacatctagtgcgcattctaaccgttttttaggaaaaataaaaccgtacagacaatttgttagcggattgacatgttttttatctgtttgtcctcattttgtcttctcatagtcatctcatgacaaactcaatcgtggaataattgttccatcgcctcgtcaatattggtaatgggctggcggcagctgtagttttcacaaatataaacagtggtcctgtcgtcgattgttttgtaatcttttgcaaaaggtgcgatttgtgctagatcatgtccagtttcggcggtcaatatgatatcaaaaggcatgaatcgtttccgaagcgcctgtaaaagccgttctttttgagggtcgccatttttcccaagaatgatgatctctctttttgttgcatattgatcaaggagcccttgcagaaacgctgtgtgcccacttggataggaagagacatcgacataaaaggctttgaacatctgctctaatgtgtctagccagtcctgacgtccggtcagtctgcttagcgtgagaagctgcttgagcgcggtactgttaccagacggcatggccccgtcatacacttctttttctcgaacgataagtgcttctgcatctgatcctgagaagaaaaagccccctttttccttgtcccaaaacagctcaaacatgttctcagctactgttgtggctttttccagccattctcgttcaaaggttgcttcgtataaagacatataggcttttagcatgtgagcgtaatcctcaataaagcctagatgcttcacgtcaccttctctgtagcgaaccatcagccgatcgtgttggacaaggtgtgtctctaggaaggacatcgcctgtttcgccatacggatggcctctttttcatcaaatacccttccagctttggcgagagcagagatcatcagcgcattccaggatgtgagcaccttgtcatcgacaagcggtgcaggacgctgctgtctaacagaatgtaaaatgtgccgggcttcttttagcttagactgaagcgtgtggtcatcaatcgagaaggaggctttgatgtcatcaaaagaggtggaaatggtatgaggaatgttcgccccttcaaagttcccctcttctgtaatgtgataaacagcgcagaataatgccccgagatcctcgactaaatgagtcatgatctcctcttttgtccaaacgtaatattgcccttctttcccttcagaatctgcatctatcgctgaataaaaggagccatcgtgattcatcatatctcgtttaataaattggatcaggcgttggacaagcttttcatattcgggttgttgagtgagctgatacgcttctgtgtaagcctccatcagcaaggcgttatcatacagcatcttttcaaaatgaggcacaagccatttttcgtctgttgaataacgagaaaaacctgaaccgacatggtcgtatataccgccatttgcgattccatctaatgttttcgtgactgcatatagcgcattttcctgcccagtccattcgtaatagcgcatcaagaatgaaagcatatgaggtgcaggaaatttcggtgcggagccgaacccgccgtgcagcgtatcaaagctgctcatgagctggtaataggctttgtggatcgcctcttgagacaaggtattttctgtctgtcctgctgctttgatccgcaaattatttgtcgccttctctgccaacgattcgatatgatcgcggtcgttgtggtacgcatccagcagttgcgtcagtgcttcaatgaaaccaggacgtccgtaagcacttctctttggaaaataagtccccgcataaaaaggcttttgatcaggcgtgacaaatacattcaacggccagccgccttgccccgtcatcatctgacaaacagacatatacatagaatcgatgtctggacgctcctcacgatcgactttaatcgaaatgaaatgctcatttaagatgtcagcgacttgctgatcttcgaagctttcgtgtgccattacgtggcaccagtgacaagtggcgtagccgatgctgacaagcactggtttattttcacgcttggctttgtcgaaggcttcttgcccccacgggtaccagtgaactgggttgtgggcgtgctgaaggaggtacggtgatttttcgttgatgagttggttgggtgtttggttgtttggcatgggtcacctgcttttacatcattagtttaatttcatcttaaatttcttaaggagtagagactaagtcattatttgagtgtatcattttgttaaaatataggtttttcttgatatttggaaactgaataaacaccctacaattttaaaattcgaaggagttctaatgtctaaaaaaataatgagacggttatcactgctatgctttgtaataggtgttctactatggagccctaatttgatatttggatatggaagcggattatggttattgaattatctattaggtccagttggtattatattaagtatttatagtagaaattatctttatacgtttttaaacttactcaccacatttagcttttttatcttcatgtttcttgggtatcactgatttacaacgtgacgtcaattcacctatctaatactaaataataagaatggagagataaaatggactatgtttatcagaaaaatgaaaagaaaaacggtaattgtgtcatatccgttcgagatagatgggagaattcaattattgaatttgaaaaaaagctacatcacattgatatagtggttaattaccgtaatgataaaacaacgaagtattcaatgccaatagagatttttgaaaaagtttacgatgatctacacagagataattgaggcctaaacttttcaacgcctcattgatgttccatttcaattctcctctacttcttcaccagcacatattgtaagtgttctaattcaaacatatcaatcagttcaccgatctctttaaaatcgatatgtttcccaaatcgttttttgcttaggtcaatttctacatttaattgatcgtctttttctttcgtttccaggccgtctacacaagagtagatttcaatggtttctcctttggacagctctgtttcaatgaaaaggaaaagaggacggagagaatgaatgatgcctaaatcataaacaaaaggatgcgtgaatttgtctcttacggcttcatagaccggatctacataagcaatgtgaatgtcagcaaagtcctcttctgtttcgtatacttctatcaagggctcttctttttgataggttttgggcttttttcgttttctatcaaccgttttgatattgagttcagagagtggtttataggtagacttttgaccaaaggtaccaagcggcagctctttattagcaccaatatagtgatgtaaagtcatatgtgtgtcctcttttcgccaactaatttctcgtgcattgattaacttctttttatcaataaatggtggaatgtgcaattcttttcacatacgatctatcctttctctataaaaaggagggcaagtcgtttgactaaatacctcttagggtatactatctgttcatagaaagaatagaaaggagtgctggtacatggaatataatcagcagatgaagaaccgtcttcgccggattgaagggcagattaaaggggttctttcgatgatggagcaaggcaaggattgccgcgaggtggtgacgcagctgtctgcatcacgtaatgccattgatcgggcaatgggtgtgattgtgagtacaaatcttgagcaatgtgttcgtgaaagtcttgaacaaggcaaggatacggaaggtcttgtgaaagaggcagttgagctattggtgaaaagccggtaagaaattcctcagcctttggtggttgacggatttttttacttgatgtaatatacccttaccggtatatgtatattttttattttctatatacccccataggtaattgttgaaggaggagcagaatggaagaacagaaaaaacgcacgacgattgtgttatttagtggagattatgataaagcgatggcagcttacattattgctaatggtgcagcagcctatgatcatgaggtgaccattttccatacgttttgggggctgaacgccttgcgtaaggatgagatggtaccgatgaaaaaaggatttttagaaaaaatgtttggcaagatgatgccgcgcggggctgatcgcatggggctttccaagatgaattttgcgggaatggggccgaaaatgatcaagcatgtgatcaaaaagcacaatgctatgaccttgccgcagctcattgagatggcgaaggagcaggatatcaatctcgtggcatgtacaatgacgatggatcttttaggattacaggagaaagaattattagatgacattcaatatgctggtgtagcggcatatttagcagaggctgaaatcggacgtgtgaatttatttatctagtgaggtgaagcaggatggtgcagacgattttactcatcatcgtaattggattactcgtgagccgctttttgccggtacgaggtgtaaagcaaatggatgcagctcatatgaaaaagaagctgaaaagcaaaggtcaacagctcattgatgtgcgatctcctagtgaatttcaaacaaatcatatcaaaggctttcaaaacatcccgttgtctcatttgaagaaacgagcttctcagcttgagaaaaatgaagaggtctatgtgatatgtcaaagcggaatgagaagtatgcaggcggcgaaaatattgaagaagcagggatttactcagattacaaacatcaagggtggcatgaatgcttggcattaaatgcgcaataaaatatacccccacccctatataaaggaggataagacatgcagcaaccaactgtcattttagatgcaaaaggactggcatgcccgatgccgattgtgaaaacaaaaaaacaaatgaatgagcttttaccaggagacgtactggaagtgcaagccactgataaaggatcagcagcggatctagcggcatggtcaaaaagtgcaggccacgaatttttaggaacaaaagtagaaggccaggtgcttcatcatttgattcgtaagggcggagaacaagagaaagaagggaagtccatgatttcggaaatgtctttggagacttttcaacagaaagtaaaagaagatccatctttgtttattttagatgtgcgagagctggatgaatacgaggcggggcatattccaggagctgttcatattcctcttggtgaggttgaacaacgtgcggaggaattgagccgggagacggacatttacctgatctgtcattcaggcagaagaagtgaattagctgcgcaaaagttaaaagaaaaaggatttcatcaattgacgaatattgtgccaggcatgaatagctggacaggagcgattgaaaaataggagctgaatggaacatgacggtaaaagtgatgaacgcagagcagttaacaaaaaagattgtgaacaaggaaccgctctttttactagatgtgcgaaatcaagcggatgtacaggactggaagatcgaaggggaagcaatcgttcatatgaatgtgccttattttgatctccttgaaggagtagagggcattctgcatgacattcctcttgatcgtgaagtattggtggtttgtgccaaggaaggctcctctatcatggtcgcggagatgctgtcagaggcgggcagaacggtccattatttagaaggcggcatgaaggcgtggagtgagcatctagagccagtgaagattggtgatttaagcggcggtggagagctctatcaatttgtacggatgggcaagggatgcctgtcttatatgatcatgtcgaatggagaagccgcaattgtagatgcagctagaatgacggatgtctatatgcgttttgctaaaaagcatcatgtctctataacgcaagtgttggacactcatcttcatgcagatcatatttctggcgggaagaaactggctgaacagacgggtgctagctactggctgccgccaaaagatgcagaagaagtgatctttgaatataaccgtcttgaagaaggagagcgcatcgcgataggagcggctaccattgatattcatcccctttactcaccggggcatacgattgggtcaacatcttttatcgtggatgatcaatatcttctttcaggtgatattttgttcgtggattcgattggaagacccgacctcgctggaatggcggaggactgggtaggtgatttgagagaaaccctatatgaccgatatggcgcactttcaaaagaattgattgtgttgccagcgcatttcatgatcatggatgaagttaatgaagacggaagcgtttggaaggagctaggcgttctatttgaagaaaatcatggactgaatattgatgatgaagccgtatttagagaaatggtcacgaagaacctacctgcacaaccaaacgcctatcaagacattcgtcaaaccaatatggggaagctgagcccagacgatgaagcgcagcgtgaaatggaaattggtccaaaccgttgtgcgattcggtaatgtccaataaaataagaggagaggaacaacgaaatgacatcagatcaaatgttagacgtcacagggcttgcatgcccaatgccgattattcgaacaaagaaaaaaatgaacgacttggcggaaggtcaagttttagaaatacatgcaacagataaaggagctaaagctgacttagcagcatgggcgaagtcaagcggacatgaattgatcacgcagacggaagaaggacatgtgctgaagttctgggtgagaaaagggtcctaaaggatgtaggggtatctgctgaagatccccttttccttttgcaaaggaggagaccagcgtggattttgcgtttttgattacactttttatcatcggatgtattggttccttcttatcaggaatggtggggattgggggatccgtgatcaactatcctatgcttctttatatcccgccacttgtcggtgtgatggcactctcggcacacgaggtatcaggcattggcgccattcaagtgcttttttcgacgctcggtggggtattggcctatcgtaaaagcggatttttacatcggtcgttgattttatatatggggagcagtatattggcgggcagcttactaggcagttatgtatctcacttcatgccagagaatgggatgaatctcgtctatggattgcttgcgattgtggctgtggttctcatgctgattccaaaaaagggacagcgtgcagatgcagaggaagaagtcacttttcataaaggacttgcggcaggtattgcctttgtgattggtagtgtttccggggtactaggcgcgggcggagcatttatattggtaccggtgatgctgtctattttaaaaattcctgtcaggatgacgattgcgtcgtcccttgcgattacgtttctttctgcgatcggtgcatcggctggaaaggtattgacgggtcaagtcatgcttcttcctgcggttgtgctgatgctggcaagtttaatcgccgctccgattggtgctaaggtcggtcagaaaatcaacgccgtctacttacaatgggcacttgctgcgatgattacggcgacagcgctcaaaatttggctggatttattataaagaaaagaccaacaaagcaaacgtgttggtcttttttatttgacgtcatcgtgctcgatatatgtttcaagggctggatgaaactctttttgataatgaaggttggggcatgttttcacgactttgccttgcagggcattggacttagagacttctaatgctgttttacatttagggcagcgttcggcaaacagtgagggccagcgcttcatatatcaccactccagttaaagtcttaaaaaccgattatattaatatgaattataggggatcgtgcaggtgaggtcaatgggtgtttgggtctttttaacaaaaaaaaaagcatcgtaaaggatgcttctctttcgtttcgattctcaataagctttcgcccagaagaccatatcagatgcaggctttccgcagcagacacatgtgtctgctgcggattcctgttcaaatgggatacagcgtgaggtcgcccctgttctttctttaatgtcgttttcacaggcttcgtcaccgcaccacatggctttaatcaatcggttttcttctgaaagaatgtgctcaatgtcttcaattgtgtgagcttttgatgttttttcatgtaatcgttctttcgccttttcgtacattgtccgttgaatgtcttcaagcgtggatgtgatggtttgttcaagtgcatctaacttgacggcttgcgtttcacctgtgtctcgtcttgcgagcatgacctggcctttttccatatcctttggtcccacctctacacgtaaagggataccttgcatttcacattcgttgaatttccagccaggctgtttatcgcttgcatcgatgtcagcgcgtgcgatgctggcgagtcgatcctttaattcataggcatgatcgaggacaccttctttatgggaagcaattggcacaacacgcacttgggttggcgcaatgtttggcggaaggacgagtcctctgtcatcaccgtgcaccatgatcatggcaccgatgattcttgtcgtaaagccccaagaggtttgctggacatgctctagttttccttcgcggtttaagaattcgatgccaaatgctttggcaaatccgtttccgaagaagtgagaagtggccgtttgcagcgcttttccatcatgcatcaagctttcaaccgtataggtgaagcgggcaccagcgaatttttccttctctgtttttctccctttaatgacaggaatggcaaggagctcttcgcaaagagaagcgtagatgtgaagcattctttctgtctcttcaatcgcttcttgctcagtctcatggcatgtgtgtccttcctgccataggaattcaagcgttctaaggaatggacgtgtggttttttcccagcggacgacattcgcccattggttataaagcttcggtaaatcacggtaggaatgaatgatatttttgtaatgctcagcgaacagtacttcagaggttggtctgacgcagagcctttcctgtaattcggattcaccgccatgtgtgacccacgccacttcaggagcgaagccttcgatatggtctttttcctgctgcagcagactctctgggataaagagcggcatatacacattctcatgccctgtttctttgatttggcggtcaagttcgtcgcgaatattctcccaaattttaaagccatatggctgaatgatcatactgcctctgacgcttgaataatcgacgaggcgtgcctttgtgacaacatctgtataccactgggcaaagtcgtcttccatgcttgtgattttttcaacaaattgtttctttgacattgcatgttcctcctttgtaaaaacaaaaaagctgtgctttaagttagggaccattcctggtggtaccaccctaatttaaagcacagctttacactcgatcatgataacggtatgaaccgctgtatgaaacagaactaaatcggcaggttcacttgaagatgtcagtaggaacttctcagcacggttccctctctgttaaaggtcaattcaagctactattccagatctacgttgatcaatgttcgttgatttttcatcagtttacctgtaaatgcaggagaaagcaagttgtactggggtttcttttcatgctgttctgagtgctttgtttgatcgtgaatttgcagtcatttcctatttttacagcttgccagttatgtaaggctatgctaatatatttgaagaaaaaaatagacttgtataacctcaataatatggtttgagggtttctaccaggatccgataaatcctgattacaaaagcgcgctttccttttttgtaatcagggtttttttgtttgtctgcgccctgtatcaaaagtgaaagcgatgatatagagaagggatgttagacatgaactggagagtatatttattagccgtttctacttttgcggttggattagttgagcttgtggtcgggggcattttgccaagccttgcagaggatttgaatgtatctcttgcgacagctgggcagcttatcaccgtatttgccattgtgtatgccatttcagcacctgtgctgctgactgccacagctaaaattgaacgaaagcgtctttatctaatcgcgttattggtgtttacaatagggaatgtattcacatattttagttcgacttttgcccttgtcatgatctctagggtattgatcgcaatgagtacagcgcttgtcgtggtgttgtcactgacgatcactgctaaattggtggaaccagcgcatcgtgcgaaggcattagggctgatttttattgggattagttcttcacttgttctcggtgtaccgatcggtatttttattacagagagctttggctggagagtgatgtttttaggaatcagtattttatcagcgatatcgatggtgctgatctatttcctattggagaaaatgcctgttgaaaaagtgacacctcttagagagcaaatacgttctttagggcatccgaaaatttttagtgcacacttgattagtttgtttatgctggcaggtcattatatgctttattcttatttcactccgtttttaatggaagttctgcatatgaccccgttctggattagtatttgttatttggtctttgggcttgcatctattggcgggaatgggtttggcggctggcttagtgacaagctgggttcagggaaagccattttgctggtgacaatcgcgtttgcagttgtgatgtttatcattccttatacagcgggtgtgtttgtcctctttatgatcatggttgtcctatggggagcgcttagctgggcattaacgcctgccttgcagagttatttgattcaaacagatcctgtcacgtctgatattcagcaaagcttaaatacatcggccttgcaaattggtatctcaattggatcagcggttggcggtgtcctgtttacgatgaccggttcatctgttgatctggcgaaattcggtgcagtgtttgtgctgattgcctttagctgtgcggtgatttcgttgaaaagaccaccactttatatggatcgtcagcatcgtgctgaatagctgcctcatgataggcagctttttttctgttctatattatttcaacatctcacgaaaagagcctttctttccatgaattatagcaaataaaagaaagaggagctgtgacatgatgggtcatctagtagaaaagtacatacaccattttcaggtctgatggcctgttctttttctcacactgacatttcttttgactcctcttttaattattagtaccattttattaaccagttaagagtggaggttcagatggaaactaaagagcagattgtattaaaagcgattcaagatctgattatgcatagggaaaagagacggaatgatccaacagatccactgattaccacgactgatacactcaagcaagattggacactcacacagcttcacattttatcgatgattcaagccaatccaaacgaatcaaataatacatttctttctcaacaactaaaactatcaaagcctgccattacaaaggctgtgaaaaaactaattgataaaggcatggtggactattgccaccggcaaggggataagaagtcggtctactattcattgacagaaaaaggcacgcaattggcggcactgcatgatgaattacatgagaaagctgtcgcgtcctacttagaatttctccagcagtttcatgaagatgaattacaagtcattgagcgctttttaaaggcatggaaagaaaaaatatagattgaaaaaaccgaaactatcgtagaaaatgagatgatttcggttttttatatggtaaaattaacatatattgacgttattcctgatcatgttaaaagggagggagcttctctggggaaagaaatgatggaaaattttaaaaagtcagcagccatcatgccgttcgtaggactgtttgtcagcttgctattatttgtttactattttggcattacaggagttgaagaacctgtttgggcggccgctttgtattgtgccctgccctttttagggtacacgatcttctatctgcctgtatgtatttattttaaagtcagtaaaaaacgctcaatccataaaaatgaggaacagacgtgattgtggtcagcgcttgtcttgctgggttgaaggtccggtataatggcagccatcgattagatcagcgaattgaagagcttgtgcaggaaggaaaggctgtgacagtttgtcctgaactgcttggcggcttctctacgcctagaccaccggcagaaatcattggcggagatggatatgatgttttacgggggcaggctgctgttgtcgatgttcatggaactgacgtcacagagatgtatgtaaaaggtgcaaaagccacgctggaacaggttcagtctctgaaagcaacagcggttgtgttaaaagagtacagcccttcttgcgggagccggctgatttaccagggagagtttaacggtaagacaaaagcgggtgatggtgtgacgtccgccttgctgaaacagcacgggattcaagtgttctctgaggaggatgattggacttcgttgtttcaataggtgtggcgtggatagaaggaggagctaggttgaaaaagtggatcattggtgtaggtgtagtggttttaataggaataggtatttattttatgatcaataccaaaacatactcttttgatgatgtgacctcactggataagaataaggtgacttcgattcaaattgagcatgataatgagcaagttgtggtagataagaaagaagatattcaaaagctgctgaatgaattttcaggtatgaaattaaagaaggcgaatggcgctaaaaaagaaacaaaagagtcttattggattagggtgttagaggaaggcaatgttacatacggattcgtcttttatgatcaagcttatttagagacatatgatggttctaaaacgaaaaataagatcagcgaataccaaatcgttgacgccaatcaagtcgatataggacaatatatcaaataacaccagcgaaatttcttgcatgatcaatagaaaattcgggtatagtgcttggtaagtaaaaatgaagcggaggtttgtttgatgagtggattaacagatacagtcacattagcaaacggagtaaaaatgccgaagctaggctttggtgtatggcaggtaaaagacggggaagaggctgtaaatgcagtcacagacgctcttgaagcgggctaccgcagcatcgatacagcagcagcctatcaaaatgaagaaggggtaggcaaagccattcagcaatcaggcatctctcgcgatgatctgtttattacgacaaaggtctggaatcgtgatcaaggctatgaagcaacacttgaagcctttgaaacaagtatgaacaagcttgggctagatgtattagacctttatttaattcattggccagttgaaggtaaatataaagatacttggaaagcactagagaagctgtataaggatggacgcgttcgagccatcggtgtgtgtaacttccatcagcaccacctagatgatttattagaagaggcagaagttgtgccaatggtcaaccaaatcgagatacatcctaagctaacgcaggagcctttacgagactactgcaaggagaaagggattcatgtagaagcgtggtcaccattaggcagcgggaagcttctgaaccatcctgttcttcaggatattgcgaaaaaacatgacaaatccgtggctcaagtcattcttcgctgggacttgcagcatggcattatcaccattccaaaatctgtgacgaagagccgaatcatcgaaaacacacaagtcttcgatttcgagctgtccgcacatgagatgggtgtcatcgatcagctcaatgaagatgagcgcacaggtccagatccagataactttgatttttaatcgaaagaaaagcacaggtggatgcctgtgcttttttttatttaacggtttttcgaggctgatacgttttcaatgacttgaatggcgtcggcaatttgctctttggaatagtctccaatcaagcaaaaggtttcgtctgcacgtgcagcatggcttgccactgtttttgcggcttcttccagctgagctgtgatgccaagctcacgcatatttctaggtaatccgagtgtttcataaagctcaagtaattcttctacttcgctcattcgattttctgcggcaagctgaacaagaatgccataggccactttttgaccatgtaatacgtgatgcgtttcttcaataaatgtcaatccgttatggatggcgtgagctcctgccattctgccgtagcgtcccccgtacccgccgaccgtgccggctaatgtaataatggtatccgttacatccgcaaatgcttgcgagtgctgccctgttgtcaagctgtggacggcttcttcgctatgggaaagaagaatgtctctgacgtataccgcctgctttagtgcagcatgcaccatgagcggtaaggagtcttttgcatttcgaataatggcttctgcttcataccatttggccagcgtatctccaatcccactttgaaggtaggaaagaggagaagaaagcaaaaatgtatgatcaatgagcgtgaggtagctggaccgtttatgataatcgactctcatgaaattccccttgtcatcataaatgacgctaagcggtgtagatgcagcacatgtccctgggatggttggaaccatgatcacttcaatttgaagagcttctgctactgacttggcggtgtctaaaatcgtgccgcctccaatcccaatcatcacatctgcccctttcagttcttcagcaattcgtgtgatcgcatttggtgaactgtatcctttgtgctgaacaacaggccaatgaggtggaagctttgtgtacgctgaaaaagcatgaaatgaatcgtgtcccgtcagtacagcgggcgactggaaggatggagaaacaagtgaatcgagttgatgataaatccctttttgagaaataaattggtttgggccgcttctgacgatatcttctggctggatcattgagttctgctcctttacaacatcatatttcataaatcatctcattttacagaaagttctgtcaaatatgaggaaaaagacccttccgttttatggaattgagccgctgtcattgcctttaggtatgtatttcctgtatgataaagaacggtatgttttgattaaatttaagaggtgtttatatatatggaaaaacaatatcgtgtcttactttactatcaatatgtccccattgaggacccagagacgtttacagcagagcatctagcattctgtaaggagcttggtttgttaggccgtatccttgtgtcagcagaaggcttgaacggaactgtttctggtaccattgagcaaacggacaagtacatgcaagcgttaaaagaagatccgcgctttgcgtctatgccgatcaaaattgacgaagcagacggtcatgcgtttaaaaaaatgcacgtccgccatcgaaatgaactagtgaatctgagccttgaagatgacgtgaacccgttagaattaacaggtaaacatctcagcccagttgaattttacgagcaaatgcaatcacctgataccgttgtgattgatgcacgtaatgattacgagtttgatgtcggccactttagaggggcagtacgtcctgatatcgagacattccgcgaattacctgagtggattcgtgacaataaagagattcttgaagggaaaaaaatcctgacgtattgcacaggcggcgtacgctgtgagaaattctcaggctggttaaagcgtgaaggctttgaagatgtctctcagcttgacggcggaattgtcacgtacggaaaagacccagaagttcaaggaaagctatgggatggtcaatgctatgtgtttgatacccgcttaacagtgccagtgaatcaaacagagcatgtagttgtcggaaaagatttcttcaccggtgagccttgcgagcgttatgtgaactgtgcaaaccctgcatgcaaccgcaaaatgattgcaacagaagagagcgagcataagtatatgcgcagctgcagccatgaatgccgtacaagtgaacgtaacctttatgtgaaacagcacaatctgtctgaagaagaagtgcaagaaagactagctgtgattgaaaaagaacaagcaatctcacaaggatagagggaccccctttatcctttttttctatacacgagagggttcagaagaaagagggattcatttcctctttctttttttgttttgtttttttcaaaataagggtaaaggtagttattcagtctaatagattgaatcgttgaaaaagcgctttctttagaaataagcatgttcgactatttcagaaaatagagaattgagagataataaaacaggcgaaaaaatgaacaagggtaaagatttagttgaagaaatatttgtcaattgattgaaaagtgagctgcaagtaagaaagacgcttacttgggcacatgctttgtaatttaatcgaaaggtgttatgaacatgaatcatttgcatcgtagaatgggaactttcgctttaatgatggtaggtcttggctcaatcattggttcaggatggcttttcggtgcttggcgtgccgctcaaattgccggccctgctgctattttgtcctggttgattgggatggtcgtgattttatttatcgctttgtcttatagtgaactcggatcgatgtttccagaggcaggcggaatggtgaaatatacgcaatattcacacggctcttttatcgggtttattgctgcttgggcaaactggatcgctattgtctccgtcattcctgttgaggcggtggcttctgtccagtatatgagctcatggccttgggagtgggcaaagtggacaagccatttggtcacaaaaggggttttgacgacagaagggctcatggtcgccagtgtacttcttgtgatttactttctgctcaattattggacagttgggttattttcaaaagcgaatacattcattactgtgtttaaaattgtcattccaggattaacaattggtgcgctcttattcgtaggttttcatagtgagaattttacttctggaacaagtattgcccctaatggctgggcgagtgtgctgacagctgttgcgacatcagggattgtgtttgccttcaatggcttccaaagcccgattaatatggctggtgaggcgaaaaatccaggccgatcgattccgatcgccattgttggatccattttgattgcgactgtaatttatgtgcttttacaaatcgcctttatcggtgctgtcaatccgtccatgattgtgaatggatggggccatttgaattttaactcgccatttgctgaccttgccattgcgcttgggattaactggctggttctgattttatatgcagatgcgtttgtatcaccttctggtacagggattacgtatacggcgacgacatctcgtatgatttatggaatggaaaaaaacaaatacatgccaagcgtgcttggccgtctgcaccctatttacggtgtgcctcgtccagcgatgttttttaacttagccgtatcgtttatctttctgtttttatttagaggctggggtgtacttgcagaaatcatttcagttgcgacgctcatttcttatttgacaggtccagtgaccgttatgacactgagaaagacagggacagatttatatcgtccgcttcgaataaaaggactcagcatcattgctcctctcggctttgtctttgcctcattgacgctgtattgggcgaggtggccgttaacaggtcaggtgctgttcattatcctcatcggtcttccgatctatttttactatcaagcaaaagcgaagtggaaaggcttcggccgcaactttaaggcgggtgcttggatggtcgtgtacttgcttgtgatgatgacgatttcctgccttggcagtgacaaattcggcggctataacgtcattcattatggctgggacatggcacttattacagtggttgccttgctattttatatgtgggcactcaaaagtggatttgaaacagaatttctaaaggatgcgaaaaaaattaatgatgagctgcgtacttctcagcaagaagccgcatcatccaaagaataaaggaacggctgcctgaatatcgcgggcagccgttttattttgataaatgatgcatcacgtgctgcctcagccaagtggtgacgccacgcaaaacggctgctgtgacaaatgagatgagcacatatctccaaagctgatccatgccttgtccactaagccaaaacacgattcctagaaaaacgagtgtgaatagaagcatgaataaaaatgatgcagaccagaaaaaagccttcactgaaggtcacctcctcggagtattgtatgcaggcaattgaatgatcagaccagctatgaaggggtagaatcatgatgaaatctatttcaaaagtcagataaaaacaccaagtgatttgacagttgtgttaagatgagagcatattttgagtgaagattgtgggtcatagacggaggtgtttggggttgcagatacaaaaagttctaaacaataatgtcattagtgtgatagatgaacaaggaaaagaaatcgtcgtcatgggcagaggtatcgcgtttcaacgacggcctggagacccggtagacgaatcgttaatcgataaagtcttccgcctggaggatcactccgttcatgagcggatgaaaatgctgcttctggaagttccgtatgatgtggtcaaggtaaccgaagaaatgattcaatatgcacatacaaagctgaaccgaagattaaatgaaagtctgcatgtatcactcgcagaccatattcattacgccatcgaacgattgaagaaaaatcacctcattgagaattcgcttatttgggagattaaacgcttatacaaagatgaatttcttgtggcaaaggactgtcttgagatgattgaagagcgtcttcatattgaactgcctgaggatgaagcaggctttattgcgatgcatatcattaatgcagagctcaatgaggacatgaatacaacggtcaatatcacaaaagaagtaaacgccattctcaccattgtgaaatatcatctcaacatggattttgatgaagactcactcaactattaccgttttctcacgcatttgcgctttttcgtccagcgtctgatcaacgaaacactgcttgtcagcgaagatcaggacttgtatcagctgatcaaggtgaaatatccgaaggcttacgaatgtgcaaagaaaatcgcagaatatgtctatcaaacctatcaccgagatctcacatcagaggagatgctgtatctatccattcatttgaatcgattgatcaaacgagaaaaataaaggtagattttaaaagaaagcgttgacatgagaaaagctgagtggtactatttgctcataaacataaaagaatacggtttcacaatgatcgtcttagaggattgtgactgttcggcaggcaaaacctaaacgttcactgaaaaagcgcaatggcaagttgcgactatttttggtgcccgtttaggtttttattttgcccaaaaacgtatttttttgaaaaaaagggggtttttgtatgagttatcgtcaattagcagaagacattatcaaacacattggcacagagaaaaacgttcattcactggtccattgtgccacaagacttcgcttcacattacatgaccgatcaaaagcagacaaagcagccattgaaaaattaaatggtgttgtaaccgtcatggaaagcggcggccaatttcaagtagtcattggcaataccgtaccagaggtttatcgagaaattggggagtttacgaatctattagaggattccacttcttcatctgcaaaatcaggtggagagagcacaagccttttcggaaaattcgtcgacattgtctctggtattttcacaccacttctcggtgtcatggcgggtgctggtattttaaaaggtctattaggcatctgtatcaatgcgaaatggttatcacctgaagatacgtcgtaccaaattttatttgctgcgtctgacagcttgttctacttcctgccattactgctcgcattcacttcggcgaggaagtttagagcgaatccatttgtcgctgtgacgattgctggtgcactcatttacccaaccattcaagagttgtcaaaaggcggcggagatgtgaccttcttcggtattccggtcgtcttaatgtcgtatacatcaacggttattccaatcattttggcagtgtttgtcatgggatatatcgaacgtttctttaacaaagtcattcatgaaagtgtcaaaaactttattacaccactgattttacttgtcacggttgttccgctgacactcattgtattcggcccatttggtgtgtatgcagggaacggcattgcagctgtcttgctgaaaatattctcctttagtcctacacttgcaggtgctttaattgcgatggcatggcaggttctcgtgatcttcggtatccactggggtctagtgccagtgattttaaataatatcgccgtccatggaaaagatcatatcaagccggctactgcgccagctgtattctcacaagccggtgcctcaatcggtgttatgctgaaaacaaagaataaaaaactgaaatcattggctggatcgacagcggtttctgccgtgtttgggattacagagccagctgtatacggggtcacgcttcgtttgaaaaaaccatttattgcagccgttctctctgccggtgtcggcggtgcgatcatcggttattcacaaagtattgcgattgcgtcagggcttccaagtttactgacacttccgattttctacggacaagggtttacagggttcatcatcggaatctcggtctcgtttgttctatccatcgtcttgacttatttgattggatttaaggatccagtagatgaagatgacacgccagcaccgatttccgcaccaacaatggaaaacgaacatggggtcaaagcagctcatgtgaagagtcctttaaaaggcgaggtgatcaagctggaggaagtgcaggataaggcattctcatctggtgcactaggaaagggtgcagccatcattccatcagaaggcaagctgtttgcaccagtatcaggagtcgtgacaacggtgttcccaacaggccatgcgtacggcctcacctctgaaagcggagcagaagtgctcattcacattggactggataccgtccaattaggcggtcagcattttgccccgaaggtcgtacaggggcaaaccatcacagaaggtgaactgcttgcagaatttgatattgaagccatccaagcttccggcctgtccgtcacaacaccagtgattattaccaattccggtgagtttagcgatatcatagaaacagaagtaaaacaaatcacaccaggacaatcatttttacatctcgtttaatcaagaggaggaagaaattatgagatattcaacactagcaccatttccaaaggactttttctggggcggatctacttccgcctatcaagtagaaggtgcgtggaacgaggatggcaaggggccttctgtcattgatatgagagcaagttaccctgaagggacaacggattttaaagtcgcaagcgatcactatcaccgctataaagaggatgtgaagatgtttgcagaaatgggtttaaaggcttatcgcttctctattgcatggacacggatcattccagatggagatggggagatcaatcaaaaggggattgaattctatcattctctcatcgatgaattgcgccgctatgacattgaaccaatcgtgacaatgtatcattttgatctgcctcatgcgcttcaagtaaaaggcggttggtcaaatcgtgcgacagtagatgcgtttgaacgttatgcagaggttctctttaaggaatatggccagaaggtaaactattggctgaccattaatgaacaaaacatgatgatcttacatggatcggcgctcggtacacttgatccaaatttagaaaatccaaaaaaagaactgtatcagcagaaccaccatatgctcgtagctcaggcgaaagccatgacgctttgtcatcgtttgctgcctgaagcgaaaattggaccagcaccaaatattgcactcatttatccggcatctccaaagcctgaggatgtgcttgctgcggcgaattacaatgcgatccgcaactggctgtatcttgatatggcagtcttcggccgttataacaaccttgcttgggcatacatgaaagaaaaagacattcttcctgttattgaagagggagatatggatattttgaaaagtgcgaagccagacttcattgcctttaactactacacatctcaaacggttgaagcgagtaaaggagatggcaacgatgaatttgcacgcggcggagatcagcatttaaaatctggtgaagatggcgtatacaaaggcggcaacaacccgttcttaagtaaaaatgcgtttggctgggagattgaccctgtcggcttccgttcaacgatgcgcgagatttatgaccgttatcagctgccccttattatcacggaaaacggattgggtgctttcgacaaattagaagaagatggatcgattcaagatgattatcgaattgactatttagaaaagcatatcgaacaaatcaaatgggcaatcacagacggcgtcgaggttttcggatactgcccatggtctgcaatcgatctaatcagcacacaccaaggatgctccaagcgctacggattcatctacgtcaaccgcgacgaatttgacctaaaagacctcaaacgaattcgtaaaaagagctcttattggtacgaaaccttgattcagcaaaatggagagaacatcggggggtaacaaataaaaaagccaatcaccttatgcgggtggctggctttttttcttcattcactctaattagcaagatcatattgttcgagttgttctaaaatgatagtctaattatatattgtaaaatttggtttaatatccattataagagagggtctgtttatatgatgacgattctttttctgtttttcttattgtttttcattttttatgctttgaattatataggtcagaaattaattgcgaaggaatacccaatgaaccatggtgtgattgtgactctatcagctgtggaaggtattcttgtttttgtacttgttggtgttaatgagaagtttccatttttttagatccaatcacatcttgctctctactattattataccgcgaatacaatctcatttacagactgttttccgcccaaatcaggtcgtatactgttatacgcaagtcaaaaacgataaggggtgcggctgtatgaatgacaatgagcaggttttagatcctggcccattttttcatgggacgaaagcagaattgaagattggagatctgcttgaaccgctgtatttatccaattttcaggataaaaaatcaaaccatatctatttcactggaacattaaatgcggccaaatggggtgctgagttagcaaggtctgatgcgaaagagagaatatatcttgtagaaccgttaggcgaatttgaaaatgatccgaatttgactgacaaaaaatttcccggcaatccaacacgttcttatcgatcgaaatcccctttgaaaattgtcgcagaattaggttcatgggaaagacattctgatgaagaaattgaacatatgctgagctctttgaagaaattaagcgaagaagggaaaaatgtcatatacgattgatgatccatattctaaataacacgaaggccgcctcatcaacaactgggcggcctttgttctattttattgaaacaatgcatccatcaactcatcaaatgtttttgcttgcttcaggaagtgaatgcggtctggattgtccagtaaatcgacggcctgttcaaagaattgattcatacagactgcgtcatccttatgaatggctaataaaaagacaagtgatacttggtctccctgccagtcaattggctgttttaagtgtgcgatggctacgcaggatgtgccttcatttgtgatgagcgggtgaggcatagccattcctctgccaagataggtagacgacatttgctcccgctcaagcaccgaggaccgaaaagaaggcgatactagctgatgcttctctaaacggctgcatagtgtgtctaatacctcctccttgctggataggtcagcattcaataaggtcaatcgttcttgaaaaaatgccatcagctctttagagggagtcccatgtccatttaataaatgaatgatctcatttacccgctgtacatcatgatgttcaaaaaaagcgctgacctgaatcacgggttttccctttgatgcgagtgggacggttgtaatgatgacatcacagggcagggtggtgctcatgagataatcctgataggaatacagctcgacgatttccagttcgtgctgaaaggctgccttcaatttaatttcaagcagtcttgccgtccctagtccagacccgcacacgataatggctttctttttttgcgaggtatcgagctgacttctttcaaatgaagcagcgatatgcagagcaacatatgccgcctcgtcttcatttggcgtccgtaccagctgtaaggcattcagtccgctgacagccaaatcaaacgggtaaggataggacgctttgatctcatgcaaaagcggattttgtaaggatacgccatattggattcgatttaataatggcttcatatgaagcatcaagtcttgctgcaggatgttgtcatctgcaaagcggtggccgcttgttttctcaatgtgctgtagaaagaccgcaaccgcctgctgaacttccactgtcgtctgatgctgagcggcttctttccacgtttgattcgccaatagatgcatcactaagtaatctgtttcatcctctgataagatgacgtgaaaggtgtcacttacctgctgtatgatcttttgggcaattctcattaagacttgcgatctttgtgtacgagtggtactggcggatatccgctggttttttcgtgtctgctgaatcgcaatcgctaagtgaatgactaagttttttaaggcaatgtctttaatgagcaatgactcttgatgcaggttcgtcaggacaatagatcgaatggtttcaagagaaatatcaggaaaatggagctgctcccgctcggtgatatgagaaagtgcaggctcttcctcaaggagtaagtctgcatagcatgttcttttttgcagctcgtctccctcaatctttaagccaaaaccaggctttgacacaagggtcatgccgtaacgggctaacagctctcgtcctttttttaaatcactgctgaccgtcatgcggctgataaacagttcttcagccagctggtcaatttttaagtaatccggttgaagcaatagctttctcatcataaatcgtacacgctcttctggcatgacggggacgagagagcgggcaggaagcttctgttgatgaagccaaagcaggaaggcgtcttggtcacttgttaatagggtgtatccctttccgcggatcgttttaatcttggctccagcttcctttaattgctcatttgcttctttgattaaattgcggatggagcggtcagataagcgaaaagaggcagtgagctcctccagcttcacgaaccccttcgtttcaaatagccgctgaatcagctgataggttcgaggatctgccgtcatcatcattgcgcggctccttgcgcctgtaaggcatcagtaccaagagcgattgcgcccattaaacccgataatccatcaaaggatggcttggtgataatttcatttaaaggctttggcagctgcaaatacccgtgaagccgcttttctgtttcatcaagaatgagcggcagcatagcgggctgtttcatcacacctccgccgagaatgatgcgttcaggtgaaagagtgagtaataaattggcggtcatctgcccgagatagtaggcatgaagtgaccaggcaggatgctcctctggcagcatttgcgccagtgtatgatagcgtccttctatggcaggtccagatgccagtccctctaaacagtcgtgatgtattgggcagcagcctccgtaggaatcatgaggatgccgctgaacggtgatatgacccatttctggatgcaacaatccgtgaatgaggcggtgttcaatataggcaccgccgcctattcctgttccaactgtgatgtaaaccaaagaagcaggcttttgtgcttcgaccgaaaagcgggcttccccgagtgctgcacagttcacatcggtatcaagcttcatcgggagcccaagggcttgttttaaggtagagaagaaagagaattggcgccaggctgtttttggtgtatctaaaatcgtcccatagcttgggctttgttcttttacatcgacaggcccgaatgccccaatgccaatggcatcgacaggatgctttgtaaagtaatcgatcacttgccggcatgtttcaattgggtttcctgttgcaaaggaagtcatgtgttcaatcgttccgtctgttgttccgtagccgcagacaaattttgttccgcctgcttcaatgcctccaattcgcatgatcaatgccctccattaaagaggggcggaatccaaatggaccccgcccctacatgttcattttttctttacaatgtaggtttgtacctgacaaggtgtgagcggttcaatgtgtaatgatccatgttgtgctttgagtatatgtccttcaggtgtttcgcctaaattcgctgtttctccgtgttgtagagatgaactattgattgaagcggctgtttgacgcgttaaatatggattgaagagacggatgacaatgcctgttccatgctcttctttttttagagcgcttagaatggctccgtctgtctcaatgtcaagcaggctataagtagattgtaagtcttctttttcatctcggaaagagaaaattaaacgaccgtttaaaaagtctgcccgttcgtagcattgaactggggtggtataccgcttagcaagctgcgctaagtgcccctcgctgacagcgtccttgctatagtgcatgccaaatgagaacgacagtgcaccttgcagctgagcgtcaggtgtctcaacaattttttccccagatgcgcggcctggacggtaaagaagattttctttccccatttttccgaaacagcggaagagcgtatacgcaatcgttgtgtagccttctcctgtgatctggtattctctcacacagtcggtcaatagagcgacaccatatgcttcatcacgaagtgcagtaaaggattgcatcggttcaatggtgatcggtttttcttcccaatgctcattgctccaccattcaagctcttgcgtgagctctgttgggcgttcgatggttccaaactgctgatcgctcagtgatacctttgatgcgatgcctgtatcaaagaggacacgcagacgatggtctaacgcatgattgtcgacatcgacatgaaaacggatgacaggctcatctttgtttaatgccaccttcgctgtgatcgggagtgaagtcgtgaccgattgctgagagcgctcttctaagtcatatgggacagtgagagtaagctggatggtgagctcttcctgcaggccgcttttagacactgtgatgtctgctgaagaaagatccttggatgacacatacagatcttcgcgcggcggggaatagttgtaggaatctccatcgtctccattgtcttcaaagatcatttgctcagagaatgtccggcctgtttgtttatctgtgatgtccagcgatccgttgtcatttgccgctatgcggtaatacgtattttcaatcgcgcgtccttctgtttgttcccatacagattcgctcgattcatcgaaaaccatgctgacttgtgtataaccaacggacggtaagctggcggcttcaatcagcagaatggctttccatacttgttttggcatgtacacatctttacttgggttaagagaaatttgctgtgccagcacataatctgtgacatcggttttgcttttcactgtgtagtgaagcgttcttccgtttgcatcctttagtgtaaatggacgttccgtgataaaggtttcgacctcaatgacttcagaacgctttgaaggcagtgtattaaataacgtgaatgtgatttcttgctcagtttgcagtcgaatagcaatgagacgcatgtgtaagtccacaagattctcggcgatttcctttgcctgcttgtagcggaagaagacatcttgattcgtcgtgtcgctattgcagccgccaatgctgtcatgcgctgcattttcaaacatgaggtaccaaatatcacgaaccgtatcatgcggatagtcgtgtccgagtgaatagctaatcgttaggatgggttccatcacattgacgagatagttttcaatttgattgtttaagatttttaaatcagctcgtgttgaaaaaatagatttgtgaatccgcatatgcttcgcatgaatgagctctccttctaatgtttcaaaagacgtccgctctttttttactgctgcaatgtaatcttctaaactgctaatttgatagtggtgctcgttaagttcattggctttttccaataagtcaggcaggtttttgcggatcggtgcctggtcaaagccatttgggaaatagacattctttgtggttgcttttgcttgcagcgcaccaattttttcagataaaaaggcttgaaagtcctcatccttttcaggaatatttccaccgtagtagtagccaaatggcaggttcacagcaaagacctcactgccgtcagcaccttgccaattgaattcagtgtgattcgtcatatggtctgaaacaccgcgccaaaaagctgtatccacaatgccgaatccacggtaaatttgaggcatttgcgcggattgaccgaaggaatcagggacatagccgactttcatcacatgaccgaactgctgacagcgttcaatcccatattgcaggttccgtacaatcgattcacctgaaatgacgagctggtcggtttgggtataccatgggccgatgatgagacgtttggctgtgacgagctttttgattctattctcatcctcagggcgccatttcaagtaatcatccaataaggatgcctgtgcatcgagcatgaagtaatggaacctttcatctgtttcaagggtgtctaaaatgtccattacgcttttcattaagtagatacgggatcgggaggtggtgaaataccattcccggtcccagtgagtatgtggaatcacatgtacattgacagtcattgatcaacgacacctttctatgttcaaattatccttctagcacaaggtcaaaatcgtcttcttctttctgcttctggtcatgttctggcgtttttggctcttttttctcagagaaattcacaagcaggttggcgccaataccgatgacgagtgcgccagtaagggctccgattaaataggcccaccagtttccgactgagaagaagccgtatagcccgccaattggcggcatgatgtcatgaacacctaataatgcagcgaccccgcttccagcagcacacgcgacaacattgagcggaattaatttcaaaggattgacaagggtaaaaggaatcgccccttccgtaataccgataatgcccatcacaagcccgcctcgtccggcttctctaaaggttggagagaagttgcgttttcgaatcaatgtcgcaagcccgtatccaagcggcggaatgacaatcgcaatattgacgaggatggcagggaggtagacgcctgataggaagagtgcattacctgccatccaagcggatttattcaccggtccgccaaggtcgaagccaatcatcgcacctagaatcagagcgagtgcaagtgtgcttgtgccgtcagcgaccatacctttaatccattcaattaatgccgtgttcaaagcgcctaatggcccgccaagcagaacggacatgagaagtccggttaagccaacggtaataagcggtaagatgagcagaggaacgagtccggccgcggagccttgaatttgaatttttcgttttacaaaaagagcgacatatcctgcgaagaagcctgcaatgacggcaccgataaatccagcattcgttgagctggcaagggcaccaccgatgaagccggccgcaagacctgatttatccgcaatcgaataggcgataaatccagcgagcaggacgttcattaagccaatgcctgtccagccaacctgctccattaaataggcgccgtgtaaaatgccgccagcatccttataggcgtttaaatctgaaacaccaaatcctaatccgactagttttgctaaaccaacgataagggaggcgccgatgatcacaggaagaatataagaaataccggtcatgagatggccttcaatgacttttaattttgctttcattttgctttgctcctttctatatggcattgctcacgtttattgagattcagattttttcttttcaacaagtgctacggcttttgtgatgatttgctcggcattttttaaggcgcgtccaatctcgacacgtactgtgggaatgcctgagaaacgttccgcatcgttgatatgctgatttgaggcaatgatacaaaggtctgcctgctttgcttcctcagctgtaatgccattcacttgtcccataatcccttgctgctcgattttgatctcgtgaccgagctgtttacccgcattctctaatgcctttgctgccattggtgtatgagctaaccctgctggacatgaagtgacaccgacaattttcattgtgtaatcccctctttcaattgttgttcaatgacttcgtaataatagtcagcggtttgacctggttgtatcttttcgatgaaagccggttccatgaggcttgtcgcaatccctgacagtaatttcaagtgtgtgacatttgcttcttctaatggaacgagcagtgtaaataaatagcttgtgggcaaatcgtcgaagcttccccattcaatcggttgttctaactctaaaaatagaagtgaagccgtttgtacagcggagctttttgtatgaggaatggcgaagccttgctgaagtcctgttgagacttcgtcttcgcgtgtcaacaaatcggataataaccccgcctgatcgtttgtaatctgaaggtcttcagctttctcggcaatgtattgtaaaatctcattctttgatcgtccgtttacttgtgtgaaaacatgatctttttggaacaagctgatcccttctctcttgtttgttaagcgcttacaagttgattgtaatgtacttttcggcatggttaaatagcatcattttccgtttgaaatggcaaaaagtttatgaagctatctgtcatactttctggatatctcaaatcctagcttaaaacgagtttaattatgtaaaaaacagattctactaaatgcatttctgtgatattcttccaaggtattacaaaagataagggggtcttttcatgttcaaaaagcaggtcaaatcctgtgtgatcgtactcatggccatcattctctgtatggcggcattacctggatatgaggcagcagctgccagtaaaggaacaactgtcaatgaagccattgggttaaaaaatggtgaagtgatttcaggtacattacagaatgaaaaggaagagtcatggtaccaaatcacgccatctgcacaagaggtggcaaaacatacgcatatgaaaatttctgtaaaaagtaaacaagtgttgtccgtatcggtctatccaagcaaggacagagcgatgaaggatgacacttattccagatatcgtgtggacactgcaagtggagagacagagatcgacttcccgcatgcatggtcaggtccttattttgtcaaagtgctctatttagggtcggaggaagacagccgtgatgaggaagaggatgcggcctatacaattgggtataaaggagctaaccttccgccttccgaacccgttttccctgaagacgatgagcctgacatcattattattgagaaaaagtacgggcgcgaaattctccaatcgatgcgtacaattgaagataaacgttttaatgaaacaccaaatggtcagaagctgagtcgcctgctccaaaaggcaaagccatttctcaaattgaagctcatcaaacaaaaaaatgagcagcaaaaggtatacaatcatctgctgacattaaagtcactgctaaatgacgtagagaaaaatggtgcatttagcggtcatatcgtgacagagaaagaacaacaggcgatccgttccctttttgatatgctcaaaggagcaagtcctgcctatttaaagaaggaattagaagcagtgagtcaaaatattggaatcgatcagcttgaaggaaaatcgatcggttatgtattagagaagcaaaagcttgtaaaagaagagaaagtgaagacgaataagatcatttttaaattaaaggatggccaaacgcttcaatctgcgaaaaagaaaatgaaaagctatggaatccaagaaaaccgcgtgacatcgcagtcagtaagtcctttgtttaaaggaatgtatgtctatgatgtaccagcagggcaagaatcagctgggaagacactaaaagcaggcaaagctgtgatcaaaagcactgcaagaaagctgtccagtatgccgaatgttgaatttgcggagcctgttcaaacgtatcgtgcacttagcaatgacgtgcagtatggttaccagtggccactgaaaaacagtgcgcaaaacagcgggaaaaaaggcgctgatgtgaagtttgaacaaatgaatacactgattggcacaagcaagatgaagcaaacattgattgcagttgtggatacaggtgtagacagtcgtttgactgatttaagcgggactgttcgtacggacttaggtgcgaatctcattggacgaaacaaagatgcgattgatgacaatggacacggtacgcatgttgccggcatcattgccgcaaaagccgataatcattactccatggcaggtctcaatcaacatacgggcatcattccggtgaaggtgctggatgcctatggctttggagatacagagcatattgcacttggaatcaagcatgcagtggataaaggtgcaaaggtcatcaacatgagccttggcggctactacagcagggtgattgaatacgcaatgaactacgcggctcaaagaaatgtactagtggtcgtggcgagtggaaatgatggcgttccagaaatgggctatcctgcgacatcaaagtacgcaatggccattggcgcaagcaaccgtatggatattgccgctgaattctcaagctacggtaaaggactgagcatgtctgcaccaggatctgatattccaagcttaatgccagatgggaatgtctcatatctgagcgggacatcaatggcgacaccatatgtggcagcggcagcaggattactgctttctaaaaatccatccttgaagccaaatcaagtaaggaatatcttgcaaagcacagcagataagatctcctttacatctgttgatggaaaagatgacgttttctatgatgaaaacgatgagccaattgtcgatccgaaaattccaggtattgattggatgacaggtcatggcagactgaatgcatttgctgctttaagtgctgtcgaactgaatgcatctgtgagcaaagtggaggatcagcatcaaaaggtgacaggtaaagcaaaggcaggcgctgctatttctgtgtatagaggcaaaaccctgcttggaaaaggcacagcaggcaaaaatggaacttttagtgtgaagatcaagcatcagaacaaaaacaaagtccttcacattaagatttcaaaaggaaaggccgctacaacgctcaaaacagtcgtcaaaaaaggcaaagcaccagctaagccgaaagtgggcaaagtaacggtcaaaagtaaaacggtcaaaggtactgcgggtgcaggattgaccattaaagtgaaaaacaaatcaaagaaagtcatcaaaacggtgaaaacgaataacaagggcgcatttactgcccaaataaaaccgcaaaaagccaaaacagtcttgtatgtgaccgcttctgatgtgagaaaaagagaaagcaaagcggtgaaggttgttgttgtgaaaaagtaagagaagaacttccctttctaaaaaagggaagttcttttgtttgttactggaaaaataccaattaatgtcgatagtaatatagtaggaaaaaaaggaggatttatcgatgaaaaaaatgatgtttgctttctttctatctttacttctcgtattcccaacatttgcacatgcagaggaaacaggagcagtaccagcatctgtacaagtaacaagtgttacagcagccgatagtggattggtgaattacggctatggcagtaaatatcgcgtgggttcttattatccagctacgtttaaaggaacactaaaagatgcaagtggaaatctcatgcccaatcagccgatccagctttattttgaagcagcaatcaaatcatatgctcaaacagcgacaggcacaacagacgtaaatggacaattttcactgacgtttcaagttcctgcaggtgcaggctaccaaacatacaataatgcaggctggtctacacattactacgatatcgttccagtgacgttcacttcaaacgacatcaagctatcttcaaatgtcacaagtgtataccatttggcatatacatcacgttactaatctgctggaagaggcgacttggcgaaagccctgtcgtttttttcatagaaaaaaggatgtcatcatttgacatccttttctttttgttagcaaacctgctgggcggcaaccgaaagagtcgataaacaaacactcatgagccgtgactcccagatttgatcgagtgtttaccttttaattctgagctttgatggataagaactttcacacttgaacgttgatccttgaaccttcagctttgagctcttatcaaggatcatccagagatgatcagatgaggagggaatgacctttccctcggaggtgtttagttctatcgattttcggctcactaacaaaatctattaatcgatctgtattttcgttagtgtattgctttctgacaaggaaaaatcaacttccatttgaaaatcctcaatttcgttcgaaagcttttcaatcttcactcgaagacgaagcggatcgatgatcgttgcctcattttcagctaggaacgacttgacgatctcttggttggcagccgcttgtgtttttccgtcttttccaaacaaggtttctaaatgctggtcgagtctctttttcacatcttcattggtttgttctgctttgtctactagttctgtgtacaccttttttaatttccgtaaataacgaatatcgtattcaatggacgtcttccgttcaatcgcttctgccaccgtcatgctgacacccgctacatcaattgttgtggtcgcattcgacacaacaatggctgatttgatgacattccggcgtttgattaatgcttgaatcgattggtcatcagccttcgcctttttttcgatttcttcttgattttgaaacccgtgctgtatatgtttcccgatcatcaatccaccaagtacggcttcatcaacggttcggttgattctcttatctaacattttcagttcacttaatgctcttgtaatggtcatttccatattagtgacaactcccttggttcatcctgaaaatcatagattcctatcatataccaatgtgtgtttcttttgctagtgatatccttttttgtcaagttgtttatactttaaaaaacctggtgctatacaccaggttcttctcgttttttctgaatccaagctgtcacataataggcagcatagcagagcgcgatgaaaggaatgccgcagatgagggcaatccgctgatttggatcaaaggcaataccgatgacagatgcaaaacacaggaggaaggcagcaattggaaccactggatagagcggggttcgaaaggaaagatcatggagctgtccgccttcctgtaaaaaacgtttccgaaacatcaactgtgaggcagcaatccccatccacacgattacaacggccagtccagagatcgaaacaaggacaaggtataccgtttcgggtgcgatgacacttgataacaaagaaagaataccgccgatcatacttaaaatcagtgcattcaaaggaattccttttgatgtcagctttgcaagtttcttaggcagtgtccgttcctcagaaagtgaccagagcatacgggatgacgcgtatagtccagagtttgcagcagataagatcgctgtcaaaatgacaaaattcatgaaatctgcggcatatggaatcccgattcgatcaaacaccacaacaaatggacttttgatcaccccggcttcttccactgggatcaagccggctaagaccacgatcgttccaacgaaaaacaggacaagacgcagtacggttgtgcgaatcgctcttggaatggtctcgtcaggattgacgctttcacccgcagcaattccaattaactccgtacctgaaaaagcgaaattgacggccagcatcgtcattaaaattggtaaaaagccgtttgggaaaagtccgccttctccagtgaagttagaaaagaacggagcggcctcaccgccctttaatggaatcaagccaaacatcgcagctccgccaaggataataaagagaataatagccattactttaatgctggaaaaccaaaattccgattctgcaaagaacttaactgtaaaagcattgagtaaaaagatgagaagagcaaaaacgccgctccacatccaaaccgatgtgtctgggaaccagcgctgcattaaaaggcctgccgctgtaaattccgaaccgagtgccactgtccatgtcagccagtagagccaagcgactgtatagcctgtgccgggtccaatgtattttgttgcatacgtatgaaaggcccctgtaaccggcattgcgacagatagctcgcctaaacagagcatcacgaggtacacaattaatgccccgacaagataggcaagaatcgttcctgcgggtcctgcctgattgatggtatacccagagcttaaaaagagccctgttccaataacgccgcctagagaaagcatgaacaggtggcggctcgtcatttttcgttgatattgttgtgactgatcttttgcttgttccatgtcttcccgcccttttgcttagaagtatgtgtgatgattcgtggtgctatgatgtggtttgttttaagatgtccgtgatatcttctggggtcgtccggcagcagccgccgatgatatgcgcgccgtctttgtaccattgatgcgcacattcaccaaatgtatgctgagatgtatccccgctccataccttttcttcaggatcatataattctcctgagtttggatacacgacaatcggcttgctcgtcccctttttcatctcttgaatgagagaagagataaattgcggcggcgtacagtttacaccaacagcagcgatctgttcatatggttccagtacttgtacacattctctgagcaaatcaccttcactaatatgaaggtcatccttcgcgctgaaagtaatccaagcacatacaccactgaattcatcttgcagcagctttgcgatagccgttgcttcaatcagacaagggatcgtttcacatgcaagaatgtctgcaccagcttctactaatgcctgaattcttggtctgtgaaaatcaataagtgcctgctccgtgagtccgtaatttcccttatattctgaaccatcagacaaataagcgccgaatggccccacagatcctgcgacaaatggttttgtccgccctttacgacgcgcttcatcctgccaaaaaagatcgcgtgcctcttttgctaaagtgacagatcgtttcattagttcaatggcttcttcttttgtatagcctttttcagcgaagccatcaatcgttgtttggtagctcgctgttgtggcacagtcagctccggcttggaagtaatccaagtgtacttgctgaatcaattctggctgttcaatgagtattttggctgaccataaacgatcgtttaaatcgcagccctttcgttcaagctccgttgcaagtgcaccgtctaaaaccaaaggtgcgtgaggctgtaaacggctttgaataggattcatcggaatcgaacaccctcctttttagttggaaatgatggatatgatatgaggcagtagtttaaatgactaaagtgtttttgtcaaggagaggaaaaagcatgatatcgcggaaaaaccttgaaaacatgcgggttccggtgcataaacatgcagtcaaaataatagaaaaccaagtcattgacagcctctaaaaagagatatatattatggaaaggttcatttcagaaagcttcatcaaaaggcgctgtcttttgatttttattttgtccaacgactgtcttctttcgtgcagaaagagggttttttatatgcttagaaaaggaggaaagaagaaattgaaaaaatgtgtaaaagatttggctatgattctgattggttcttttttatttgctgcagcagtgaacatgtttgtcattccacttgaatttggtgaaggcggtgtaacggggctgtccatcattttctattatttgtttgaaattgcaccatggctgacgaacctggtgtttaattccatcctgctgcttgtggggtataaatatttggacaagaagacgacgatttatactgtggttgccgtcgcaagtaactccctatttttacacctgaccacaacatgggtcgtgaatgtacatgaattgatcattggagcgattttcgcaggaattatcatcggtattggaattggtcttgtgctaagagcaggcggtacaacggcgggttctgccatactcggaagaattgccaacaagtatttagactggaacgtgagctatgccatcttgttctttgatctgatcgtcgtatttgcttcctactttattattggtgcggaaaaattaatgttcaccattgtgatgctgtacgtggcaacaaaggtgatggacttcgtgatagaagggcttaacacgaaaaaggcagtaacgattatttcttcatgcaaagatgatattgctgaagaaatcaatcacactttggatcgaggcgtgacgattttaaacggacgcggtcattattcaaaggaatcgaaggagattctctacgcagtcattcaaaagcaagagctcatgcgcctaaagaaaatcatcaagaaaattgatcgagacgcattcgttgttgtccatgacgtgcgtgatgtgttcggagaaggatttgtgaatatataaacctgaaaagaccttaaccgggtctttttttatgctctatacctcttgtcacatcatactatgtattgtatagtataaatggttaggagttgtaatcatgaatgcacaattaaaaaaaggtttgctggaattctgtgtactggcggtattaaagaaaggcgattcctatggttatcaaattattaaagatatgtcccattgtattgagatttcagaatcgacattatatccgatattaaagcggttagagcaaaacaactatgtggagacctattcccaggaacataacagtcgattaagaaagtactaccgaatgacaaatagcggccgtgagcatatggcgcagtttttagcggaatgggatcaagtaatggcgatttacgactttatttctggaggacagggcaatgaataaaaaagaatttttagccagcttagagaagcacctgcatcgtctaggcgaaaaagaaagtgatcggttcatcgaatattacgatgaaatgatcgaggattatcaggaagatggctacagcgaacaggaagctgttcatcaagtgggtcagccttcaatcatcgctgaggggattatgaaggaacaaggaatcaaaactgctcaggtgccgacgttcggagaaaaagctacaaggctttccattctcattttgggctttccgttatggggaagtattttagcaacggtctttctgctgattctttctgtctatatggtggtttggtgcgttccgctcgtcacaggtgcattgacgctcactggtctgctcggaggtttttggagcatcattggttctccatttatttttcaggacggtttgcatgtggtggtgacgcaggttggagtgggtattcttctattaggtgtcggattattatgcggcatagccacggtgtatttgacaaagctatttgttcaaatgactgttcaaaccactaaggcattcatgggaatgtttaaaaagaaggtcgtgagaatatgaatgtgaatgatttaaaaaagcaatgcatcaaatgggggatcatcttcaccgttgtcggaggaatgatcatggcaattggttttggactatcaggctttgacctagatgcatatcacaacaatgaccagaacaatgtgtttcgcactatcaattggaacaagccataaatgaaagacccgcttatgcgggtctttttttcgctcgaaccacaaagaagaaataacagcaaagtgcacctagttcacaaagcataatgatcaggcccattggaaaggctgtttggcttcccgctagtccgacaagaggtgtcatgcatgcgcctagcagcatttgtgccaccccgatgagggcagctgcacttcctgcatgcgctccatgatgctgcatcgcaagagacggcgcggacgtaccgacaattccgacgcttgagacaacaaaaaacaatggaatgagaatgccatacaatcctgcatcaatggagatcatcaaaaataaggtgacgccgcctaaggcagctgtcagcaatccaatgcgaagaactttctcttcgccgatttttacagcgacacgggcaaatacttgtccagccatgatgatgccaagactgttcactgcaaaggcagcactaaatccttgtggagaaaggtggaaaagatcctggagcacaaacggtgagccagaaatataggcaaacatcgctgcgaatacaagaccctgcgagagggcatacccaacaaagagacgatcactcgctaaaattttcatggcaccaacaatctgttgaaagcccccagtctgtctgcgctccacaggtaaactttcttgtagtgaaaaaatggatctcagcagcatcaaggccccgagaattcctagtagaacaaatacaccctgccatgttgtaaagcgtaaaatctgtccgcccacaataggtgccgctgccggagcaaccccgttgaccaacatcagcagtgcaaagaatttcgtcatttctgatccttcataatgatctcgcacaatggctcgtgcaatgacaatgccagctgaaccagcgagcccttgaatcaatcttaagaggatgaacatccaaatcgatgtgactaccgtacataaaagtgatgaggctataaaaatgattaagccgatcatcagcggttttcttctgccgatcgtatcactaataggacctgcaatcagctgtccaagcgccagtccaataagacaagccataagacttaattgggacaaagccgtgcttgcttcaaaatcacgcgcaatattaggcaaagcaggtaaatacatatccattgcaagcggtgcaagggctgttaaagacccaagcaatgcagcaaggagaaatcgattttttttcgattcttggggataagataaagaactcatatgattactacactcctcgtatacttcctcaaaacagcataatgaatcaagcgttccttttcaatagaaattttcaaagatggattccgtgcaaaatgattgatctttcgaatgagactctttacattgaatgagtagagaaaagaacaaggtcatcgacatgcagtatttgcatgatacgtatatctagcaataagcaacaggaggtgctgacatgaagcagcaagagctgatcattcgtcaagcagtcaaagaagatcatgaagcgatcaggcatgtactaatcaaatcctattcacagtatgagcctcaatttacagaggaaggctggcaaaattattctgctgcgcttgcagcagctgtagataatccgaacatggagctgatgcttgtggcggagcttgaaggcaaggtcgtggggacgcttcaaatgtttcggtcatcagagcaagcgtatgacaaacccgaaatgggcattacatcagccatcgtccggtttttaggagtagatcccgatgttaggggaaaaggaattgcagagtcattgttacgtaaaagtattgaacttacgcaatcatggggcgaaaatgtcctgtatcttcatacatctgataaaatgcaggctgccattcgtctatatgaaagaatgggctttgagcgtgcactagataaagaatttgtgaatcaaaatgggacgcatgtcaagagctatcaatatgttatccaaaaagaacagccggctggttcatcacatcactcgtaataaaaggaagagcacgtccttcagggacagctcttccttttttcaatttacgcccacagtacaagcgcccaatatgataccccccacgaaattaaaccgaacatgacttttaacacgcgtttgtaaagggacagctttcgttctctcttcgttttcaccagccgccaataaaaggcatagctgcataaaaagaggatgatttgtccaagctctgtaaggttttcaaaaatcgtgattccgttcatttatttcacttcatcataggtcttccataagtaaatgcagcaaccctttatttcttcaaaaaaaatcggtgtatactggaaagagagaaactagatgcagagggagttgtgacatgttgttttcgctacgtgcggatcgttgggatgaagtaatcgagaggaaaatcaaatacgatcagaaggtcgtggaatatacttgtcagctgttagacgcacaggagcagcaggctgtgctgtttcacaagatcgaagacacgtttacgatgagggcaggtgatggtgctctgacgattccaaaagggagctatacgaccgcttattattggaaggatcgaccttacaatatttacttctggagggatgatcaagggaaggaacttgggtcttattttaatattgtggggaatacatggttcaacggccagctggtcatatttgaagacctcattattgatcttctcgttctgccgaatggtcatttctttgtgttggatgaagatgaattgccggagagtttagcggcttttgaacaaggttcagtgcgccaggcattagagggtgtgatggcttcgttagaaagcatactcgatcaagtgagggcagatgtcgaagggaaatatcatcacagcttgtttgcgccgctgttgaaataaaaaacgattcctttaaagcgaggaatcgttttttttctgttacactttgatccggttcaatcgtttttgtaaactggttttcgttttagaagcttttaactgtttcacagcggtttgcgctgctgcttttgttttctttgttcgtttggcttctgcttttttgaccttttgtttggcgtctgtcactttcttttgataggcgacctgttttttgactttgtcgagccggttttggaggcttgttttttctttgcctttgtttagctttttgatagccgtttgggcgcttttaatggcgccttgtgttttgcttttttcggctgtttggacctttgcacgtgcggaacggatatcaatggttccttgtacttttttcacccgttcggtgagtgctgttttttgtttacttgcagtgagtctgccaattctcgttttggcttgattgacatctgcctgctttttagatgtttcggctgttttgacagcgctggtcgcagccttcaaaaagcttgattgtggtatatattgcatgcggccatagccgaattgtggatcccttccttttgcgccaagatccactgtatagctgcgcaataatgtgcgaagctgtacatttgttttcttcggatgaagctgtttcaacagtgccagcatgcctgtgacatgcggtgcagcttgtgatgtacctgttgcataccaatattcattctttaaataagtgctaatgacgttctggccaggggcagaaaattcaatgcctttccctgtatttgagagagacgcgagtttgtctttgtccgtcgttgcagaaacggcaatgacgctattgtacgcggcagggtagctaatataattcttcttcccatcattcccgcttgcagcgaccacaagcagtccttttttgtatgccgcatccactgctgaatgcaagatggggatattgtcttcaaaacttaggcttaaattcataatatccatcttgttgttaatggcccaatcgattcctcgaagcaggctgtacaagtcgccttctccctttttatctaacacttttacagcatacagcttcgcaccagaagcgacgccgactgtgccataatcgttattgagcgcaccaatcgtgcctgcgacatgtgtgccatgcccttgatcatctttataggaagttgtgtacttcacaaatgatttcccgccggatatctttaaatcctcatgtggagaaataccagtatctaaaacagctaccttcacatttttccccgtgacgccttcttttatcgcttgctttacattcagcttttgcaagttgtaagattgttgaaccaaaaaattctgacccgtagcggcagcggtttttttcatagtagaagaagcgagtttaacctttatgttttttgagacataagcgatgtttggatcttttttgagtgaggtgaccgcttgttcatctgctgtcacagcgacagcgggaagatgtatgtactgagcgttcactttttcactttcttcaatagccgtttgctttcctttttggtttttatagacgatgatgacatctgtttcttttggcggtgcagctgcctgcgaatggtagggcaaagcagttgtcaacgcaagaagaaacgcgatgactatgaatattttctttttcaaggcgatagccccttgcatacgatgacctccgtctttttttctctattatatcggagaaatgagaaggatggttagaagaatcatattgtttgtcagaaagtttttttacaagtaaccttaaattgaaattcatacaaatctagtagacaatagagagatcataataagagaaagtaggatatgctgatgaacgtaaaagagtatatgacgtatgatgcgactggcttggcagcacttgtacggaagaagcaggtaacgccagacgagcttgtacaggctgcatttgctagattgaatgaggtcaatcctgaactaaatgcggtgattcagacaagacaagatcaagtattaaaagaaatcaagacattacatacgaatcagccgtttgcgggcgttccatttgtactgaaaaatatatcgcaagggatggaaaatgaaccgctgacagcaggtgctgcattgttaaaggatgtaaaggcaaaaacggattcccactttgtccatcgattgaagcaggctggatttctcatgatggggcatacaaacacaccagaattcggtttaaggaatgtaacagaaccttctttacatggtccaacgaggaacccttggcatcctgactattcccctggcggttcaagcggcgggacggcagcagctgttgcaagcggcatcgtaccggctggtggagcaagtgatggcggtgggtccattcggattccagcatcctttacaggtttgttcggtctcaaaccaacgagaggaagaacgccggtaggaccaggcgcaggaaggcagtggcaaggggcttccattgattttacactcacaaaaacagtgcgggacagtgcagcccttcttgatctgcttcaagtcattcagcctgaagcggctttccaaacgccgttatacgacggcagctatcaagaagatctagtgaaatgtacatcttctatgcgaattgcttacagtatagaatctccagtaggtacgaaggttagtgaggaagcgaagcaggcggttcagcaaacagtgaaatggctgagtgaccaagggcaccaagtagaagaagcgaagccggcaattgacgggatccatctaatgcagcaatactacgtcatgaacagcggagaaatgtctgcattattcacgtccttggctcgttcattaggacgtccagtcaatccggaggaaacggacatcgtcgcatgggtgctggcggaggctggcaagaatgtgaccgctgctgcttatacaggaagtcttgatgcgtgggatattgcggctgcacaaatggcatcatttcatcaaacgtacgatctttttgtgacaccagctactgcctattcagctccaaaggttggtgagctgatgcattcgaaagaggaaatcactgaacttttacgtgtgtcatccctctcaatgcaagcgcagcaggatctcatttatgacatgttcttaaagagtctgacctacacaccatttacacagcttgccaacttaacgggtcagccttctatgagtgttcctgttcatctcactgaagcgggcatgcctttaggggtacaggtgacagcaccaaagggaaaagaggactggctgcttcggcttgcagcagaaatggagacatcctcgatttggaaaggaacaaatcaaatcatacgttgaaacgacatttgtctatggagggaaaggagtgtcacacgtgagtacgaaggacagaatcattcaaacggctgcacttcttttacgaaaacaggggtatcatgcgacaggattgaatcaaattattagagagagcggcacgcctaaaggatctctttattattactttccaaacggaaaagaagagctagccatagcagccgttgaatatattagtcaaaaggtcatcgatcgaattgaagaaagttttgcctattcggatgacccttatatcgccatcgaccgttttatgacaaacatcattcggggatttatggagcaagaaagtgaaagagggattccgattgtcttgctggcggcagaatccaagccagaacatacgcagcttcatgctgcatgcaaacaagaaatgatccgctggcaagagcttgtgaaagaaaagctaatgaacagcggatatgaagaaaacaaagcggatgagctggcttctctccttcattcaatggtgattgggggtctatcgatgaccacagctctcaaacaaacgaccccgttagaacacgttaagtgttaccttagacacttatttatgcgagaagagtaaaatctctcgcatattgtctatctattatatcaattggtctatataataaagatagtcaattagtcatgaggagtgatgggatgtcggagcaaccgcaatcgattaagcaatccgaggatacctatttttataccgtgtctggatcagggaagctgtatgggctggaaaatcagcttgttcatgtactggcagaagcaaatcaaacgaatcagctgtttgagcttgtcttaatcacaggtgggaaaggagcttattttccacttcattgtcatgagcacttatttgaaaccattttcgtgctggaaggaaagcttgaagtgatactggacggtaaaaaatatatggtcacagccttcgattatattcatatcccgcctaaaacgattcatggctacagaatgcatagccacaaaacaaggtttatttcatatacgttgggcggacaaatgacagatgtctatcagcaaattgggaagaggcttcagcagaacgaatggctgatgactgatcatgctttcgatgcagccagctttgaacaagctgaaaaagaaagcgatctcatattgatgcatggtatccggcagctatcaaatacaaccaagccctccgttttatttcatagtcagctccctcaggcggtgcagccctatgtattagaggctggtgaagggaagcaatatatcgtggatggtcagcttcatgagctgatcgcaacaacagaaacaactggaggcgggttcagccattttgtgattgaaggcgcgaagggaaagtattttcctccgcattatcatcaagtacatacagaagcactctattgcgttgaaggaaaaatgaaccttcaattgaacggagaggatatttgcctgatgccgggtgattttgcctatataccgccggatacgattcattcttatgaattcgtttcccattctaataaatttttgcttttactgctccctggaaagattgagcagttgtatgagcagtttgaagaatcacaaagcccgagtatatgtccttattttattcaagaagggaacttgatgatcgatcgagagacttcctctcaatatgatttggtttttgtcgaaaaaggataaatatgtaacgcgttacacatgattgaataagcgcctgtcgaacccatcgacgggcttttttgtttttcaaatattcctgatctgatgcatgaaccatccattccaggtgaagctatgtacagatgattttcgctaaaggaggaaatgcatgtgagagctgttacttatcaaggaaaaaatagcattgcagtgaagaaagtagatgcgccatctattcaagatcgggaagatgtgatcatacgaattacatcaacagcaatttgtggatctgatttacatttgtatcaggggaacttcccgcttccaatcggctatgtgattgggcatgagccaatggggattgtggaggaagttggaccggatgtcacggtagtaaaaaagggagatcgtgtcgttattccatttaccgttgcatgtggtcaatgccaatattgtcatcatcatttagaaagtcaatgcgacaactcaaacccgcactacgattcgggtgggctttttggatatagtgagaaatatgggaattatcctggaggacaggcagagtatttacgcgtgccttttggaaattacaccccgtttaagatcccagatgattgtgagctggaggatgaacaattactgttcttatcggatgttcttccaactgcctattggagcgtggagcacgcaggtgtgaaaaaaggtgatacggtcattgtgttaggctgtggacctgttgggttaatggcgcagcaatttgcatggcaaaaaggggcagaacgtgtgattgcggtcgattacattgattaccgtctgcgacatgcaaaacggatgagcggcgtagaagtatttgattttacagaagatcccgacatgggagaaacgttaaaggagctcaccaagggtggagccgatgttgtgatcgattgtgtgggaatggacgggaagaagtcaccgcttgaaaaaattgagcagaaactcaagctgcaaggcggaacgatcggaccgattcaaattgctacaaaagccgtccgtaaatgtggaacggtgcagatgacgggtgtgtacggcggcctatacaatatgttcccattaggtgcctttttcgcaagaaacgtcaccctgaaaatgggacaggctccggcgagagtctacatgtcaaagctctatcaaaaagtgacaaccggtgaaattgatcctagagcgatcatcacacatcaattgccattagatgatgccgctcatgcgtatcacatatttaacgaaaaacaggatgattgtataaaggtcatcttaaagccataaaaagaaggccctcagcatgtagacaaaccctcgcattcggtgtcagtcctgcgtgccggtactcacgaatgtaaattcgctccgctccggtactcgtccttcctagggctgcaaaggttttctatgacgctgaaaagaagacaaagggcattttagccctttgtcaaaaaatctaaaggcttaggagtattcctaagcctttaatgtgtgctcgtccatcattttttcgattaattcaaaaaatgtttttttatcttcttctgaaagatggttgaacagctgattgacaagcagctggcggttatcaatcatttgttttgcgatttgttcacctgattcagagagtgtaatccatacagtacggcggtcattattatttcgagagcggataatcagcccttcatcttctaagtgattgagagcggttgttgttgcagagggagataatgaaacttcctgcagaatatttttcacagtacatgattgatggcgataaatgatgcgtaaaataaaccctttcacattcgtgacgtttttcgggatgttctcttcatctatttgcttcgtcgcctttaaatactttgtcagcgcatggtctaataaacttgcctctagctcgaaatgttgcattctccatacctcttttcctattgcgttcgcattttccgatcaattactaggtctatcttatcataatagttatcatcatttaaaccaaaatggaagacggctataaaattacctatattatcaattaatataaagaacaattccaaaatgaaatgattttactttcagctggttttattttagaatgtgaatgagataaaatctgccaaccccattcactggaaattggctattgtaaatcaaacgtttggagatgaagatattgaatactttacaggcattacttaacgacagaatggaacgctcttcacaaattgaagcggtaactggcgggggtgtgtcttatacatttgaagaatatgcaaaacgcattgaccagctcgctcattacttatatcaaaaggggattcgaaaaggagaccgcgtttgctttatttgtcaaaaccatcatcacttttcaacgattatgctggcagccatcaaagcaggtgcagtcgcagttccgcttagctggcagcttacttcttttgagctggaaggtattttgaaaaaagcagagccaaaggctttattttttgaccgtgaattccgtgacatcattgccgcagtgaatatgtctttagaagattgtctgatggtggaatccggtgtcaatgcgaaaacaacccagctgtttgaagacattttggcttcaaatgatggaagtcatcttgctgatgaggtatcagaagaggatttagcgatgattttattcacttctggaacaacgggcaatccaaagggctgtatggtcgggcatggacgaatttatcaatttttaacaagacatgggaatcgaggatttgatctgaaaggaaaacggtacttggcgagtcatccgctgtatcatatgagttcaattaatcatctgatcgcagctgcgattgaagggtatacgcttgtcttcttacatgatgcaacaccgaaacgcattttagaaacgattgagaaagaaagaattacgttcatgatggctttcccatcagcttacacgtacatgctagaagaaatgaaacgcggttcgtacgatctctcatcttttgaaattgcgatttctggcggtacgaaggtgccggtacgcttaattaaagattacaaagaagcaggcattcagatgatgcatggctatggaagtacggaagcatgggttgtcagtgcgtggcatccagcgatgggtgaggataaaatgggctctgctggtaaagtggatgcggatgtagatgtgaaaatcgtacatcctgagacagaggagacactgccagctggagaaattggcgaagtcgtcatgagaagcccattttatttcctaggctactatcatcagcctgacgctactgagaaggtgctgaaagatggctggttccatatgggggatgcaggctatctagataaagacggttttcttttcatcacaggcagatacaaagatgtgattctgtacggcggggataatatctatcctgaccaagtagaagagattattgaacaaattccaggtgtgattgagtcagctgtcatcggggtaccggacgaattatatggggaagtgccaagtgcgtatatcgtaaaagacgaatcctccgatttctccgaagaagatgtggtgaactattgccaggaacgtttggcagattacaaagtgccctccattcatttcacacaggagctgccaaaaaacaagcttggtaaaatcatgaagaaagatttacgtgaattggttgtgaatgcgtagtacctattctgctataatgaaatttgaatgattttttgtttttctaacgttttggagggaaagggtttgcgacatattcttcgtaagaaacacattcacgatttgttagaacagagcaggcagcaaaaggtaaagagaacgctgggcgggctcgatctcacgctcctcggtataggggcagtgatcggcacgggggtcatggtgttaaccggaattacagcggctaaggatgcaggaccggctgtcattttctcctttgccattgcagcgattgtgtgcagtttggcagcactttgctatgcagaaatggcttcagcgctgcctgtattcggcagtgcatacatttattcatatacaacgatgggtgagcttgtcgggcatctaatgggatggactttattgtccgtttatatgctgactgcttcagctgtcgccagtggctggtcgagttatttcaacagcttgcttgaggggtttggcatttcgattccccatcaatttttagcggggccagaacaaggcggatatatgaatctgccagccattatcattgccttactgattgcgtggatcttatctagaggaacgaaggaaagtaaaaaattcaataatatcatggtgtttgtgaaactcggtattattgttcttttcattgtagtaggcgggttttatgtacagccatccaattggcagccgttcatgccatttggtgcagaaggcgtcattgccggtgctgctgctgtattttttgcctttttaggatttgatgcgatttctgcttctgcggaagaggtgaaaaatccgcagcggaatctgccaattggcattattggctcattactcatttgcacgatcatttacattgtcgtttgtttgatcatgacaggtatggtgcactatacaaaactgaatgtcacagaggctatgtcctatgtgctgcaaagtgtacatcaaaatagcgtagccggtattatttctgtcggtgcggtcattggattgatggctgtgattttcgccaataattatgcagcaactcgaattgcctatgcgatgggccgagacggtcttttgcctaaagtgttttcgaaaacaaacaaaagcgatacgcctgttgcaagcatatggatgattggcggcatgacagctgttatttcagggtttattgatttaaaggacttgtcgaatttagcgaatatcggtgctttattgacgtttgcaatggtgagtttatctgtgctcattttgagaaagacacatcagcagcttgagaggggattccgggttccatttgtgccggtcttgccgattatctcaatgggctgctgcttgttccttatgctcaacttaccaggccggacgtggctttactttggtgtttggctgttaatcggtgtcgtcatgtacgcagcgtattcaaacaaacatagtgaattagcgaaagcttcatgagaaaaaggtgcaaatccgttgacgatttgtgccttttttcatacgatttgggataagctataaaagagaagatggacggaaacaagaggaggatgaagggtatgattagcgttagtccttatattgtggtagacgatgtgaaggaatctcttcaatattatcaaggaatttttggcggagatattcatattttaaatgaacatcaagaccgtgtgttgcatgcggaacttcaccttggagaatcattgcttcacttttcagatacgtttggccgcacaccaaagcccgaacatctcagattgattatgcagtttgacaatgaagaagaactaaaggctgtatatgaagcgctagaagctgatggagatgtactggtcgaattacaggatacgttctttggcgcacttcacggacaagtacaggaccgcaaaaatgggttgatctgggtgctgaattatatgaaatagatgaagacaaagagctaaataaagatcatgcaatgatataaaaataaaaaatgattgtggacacagcaacctcaaaaaactattcccttatatttaccttaaatctattgaatatccaggtgataaatctatgtatgatctcttttcagcaaaattattgtttgaatccataccgtctcccaaagttagacctgataagatatttgaagaaagaatcgtattaatcaaagcaaaagatcaagatgaagttaaaaaaattatagataaaagttttccagaagaaacatttggaaatggggattacggacaaacaacaaaaaaattagtagcaatcctagatatatttgaacttgtagacaatttagaagaagaaccacttcacttaagtgaagtgtattgtcgttatctttcatttgatgaagaaatatctccaaaagaagcaatagaaaaatattctctagataaataaaaatcgtaaaaaaagcagactgattagagtctgcttttttagttatttagtcatttagcacaaatacatatcttctctgtttctttcgcaataagacaccaattcgctgttcaaggatccttggtcaaaattctaagaccttcactattgtgaaggtttttttgggagtgtttttattttctgaaaaatggaaaatatgctatgttggaagaataaaagaacaaggagaagggtggcaaagggatggagcaaattgaatttcaatcgatccaaacaaatggtgtaacacttcacacagcaatggctggacctgagaatggcccgctgcttgtactgctgcacgggtttcctgagttctggtacggctggaagaaccaaatcatgcccctcgctgaggcaggctatcgtgtcgtcgttcctgatcaaaggggctaccatctaagtgataagccagaaggaatcgaatcctacgtattagatcaactgagagatgatatcgtagggctgattaagacgcttagtccgaatcaaaaggcgattgtgggtggtcatgattggggcggagcagttgcttggcatttggcatccacacgttctcaatatgtagagaaattaatcattgtcaacatgccgcatccgcgggtcatgatgaaggttcttccgttttatcccccgcagtggaagaaaagctcctatatcgctttctttcagcttccgaatgtgccagaggcagcacttcaagaaaatcactaccaacggctggatgaagccattgggctgtctgcacgaccacacctatttacaaaagaagatgtatcaagatataagctggcttggacgcagccaggtgccatgacctcaatgctgaattggtaccgcgccatcaaaaaaggcggctttgaaaagccgatatctaaacgcattttagtacctgttcgcatgatctggggtatggaggacaagtttttaagcagaaagctggcgaaggaatcgatgaagatttgcccaaatggtcagctgatttttgtcgatgatgcatctcattggatcaatcatgaaaagccagaagtggtgatcaaactcatactcgaatttttgaactaaagaaaaaagctctggtcagacgaccagagcttttgtgatttatccgatatgattctttttcaacgaagcaggttcgtcgtcccagcattcaatgttctcattgtttggaacggcatttttataaaagactggatctttcccctcttttttctgccgtgaataatcctttaatgctgcaaaggcgactttagacagcatggtaatggcaatgaggttgacgatgaccattaaccccataaacaggtcggcaagattccaaacaaaaggaacacttgctacagcaccgaataaaaccatgacaattaccgcaatacggtatccaatcaaccatgctttgcttgatttaaggaactcaatgttcgtttccccatagtaataattcccgatcagcgtactaaacgcaaataagaaaaccataatggcaagaacaccagaagcccaaggaccgatgtgttcactcaaagatgcttgagtgagctcaatacctgttaattttgtcgttttatatgcacttgagaaaaggacgataaaggcagtacttgtacaaataatcagggtatcaattaagacaccaaatgcttgaatcagtccttgcttcacagggtggctcgtcacggcagctgcagcagcgtttggtgcgctacccatcccagcttcgtttgagaatagaccccgtttgattccttccataatgacggcacccatcgtaccacctgcaaactgctcaataccgaatgcatgtgaaataatagtatggacaacaccaggcagttcagtaatgtttgtaatcatgacaaaaagagcaataccaatatatgcgacagctaagaagaccacaatgtattctgccatcttggcaatcgttttgaccccgccgaaaatgatgatactaaatccaatagccataatgacgcctacgaccaaacgatttgtgccaaatgaattttcaaaagcaatggtaatggtgttcgactgtacagcattaaagacaataccgaaagaaatggtgattaatacagcaaacaaaatccccatccagcgtttctttaagcctctttcaatatagtaagcgggaccaccgcgaaagcctgatgcatcttttactttatacacttgggcaagcgtactttcaacaaagcttgacgcggaaccgataatggctaggatccacatccaaaaaatagcgccaggaccacccatggcaattgcgatcgcaatcccagtaatgttcccagttccaacccgagccgccatactaatagcaaaggcttggaatggtgatacgccagatttttgtttatttgttccttctttcagaacgatcaccatttccttaagcatacgcacttgaaggaaacgagacctgaatgtgaaataaaggccgacaagaattaatagtgcaacaataatatatgaccatagaaaaccatttgttgttgttaataaaccattcataacatcacctcttctaattcatcctatttctttaaaaaatactgagatcccactctttggcgagctttttcagcatcatgacaccggtaatactatttccacaatcgtcaatggcgggaccataaataccgattccacagcctgtctgaaacgggaattctcttcttgcgcttggcggaacgcaagccataattcctccagacacaccacttttggctggtacgcctacgaaagcagcaaaattacctgatgcattatacatgccgcatgtcagcatcaatgcctttgttagtcttgcgatatcttttgggatgacttggacttgtttaaagggatggtagccatcacttgaaataattagtccaatcaaggcgatgtcctcagttgtgacctcgatggaacattgctttaaatacacttctaatgtgtcctcgacatctgattctaagtaattggtttcttttaagtaataagcaagagcacggttgcggtgcgcagttgcccattctgattgataaacctcttcattaacagatggacgctttcctattaagttttcgattaaatcgaaaatatatgctagcttttctgtagaagtctttccgggaaggatggaggatacggtaatagctccagcattaatcattggattaaagggcttccccggtttatgcatctcaaggcggtagatggaattaaatgcatcaccagttggctctacatctacccgatccaagacgtaaggaacgcctcttcctaaacaggcagctataaagctgatgacttttgagatactttgcagggtaaagggaacgtcccaatcaccatatcgtacagatgatccatctgggcctatcacgctgataccaagttgagaggaattcacttttccgagtgctggaatgtagccagcattctgcccgtttttgtaatacggacgtatttcttctgcccattgatcaacagaagactggcatgcgtgttgtgtattattagaaattgctgttttcatacgattcctccaatcaaaaatcaaaaagtaccctattgaattggcggatgacaaaaaatgcgatcaaataggcacgaaaacatgttacacatcttcaaagaacttgtcatgcgctgcttgtaccactcctttacacctaaatatatgttcaattgaaggctttggcggcgaaaaaacaaaaagggtttttagtgaaaattcagaaaacgcttacatatagtttcactaaaattgttcattcaatttatcttggaaactacacaatctgacgaaaatctacagaaaaacttacaaataaaaaatcggtttgtcgcttattgtctaaacaattcccattattgtagacaatctccaaaatgctgaatagctgaaaggtcaccatgccgtctcggtgaatagtcataaaaaaggattttgaggaaagaaggagctgtgaaaattatttttttgtacgttgtgaagaaaagagtctccttgtatactgtggctatgcaaaaaggggaagggatgtcagtcatttgagtttaaaccagcttgttaaaaaagacgcattcatattaatttttatggtggtgattgtgccgcttgcaggagaactgaagttttatcctgtgaatgagacgttccggatcagctttggggcacctgcgtttttcttttgtttattactcttaaggaaatctagaccgttcttgcccgggtttttaacaggcgcagccattgtgctttttcgagtaggtttagatctgatgcagcatcatgctgatctcgctgcatcattttatcagcaattcccaagtttctttttctattttacatatgcatttctgttctttgccgtccgtacgggacgttttaaacagcgctctatttttattggcatcattggtctcatgattgaattagtggctgattttgttgagctctttgtacaatttttagtgtttgatacgacgatgacgctatcaaagctgagtgatatgtttctcattgcgtttgctcacagctttgtcgtaatcagcttttttaatatgatgaagctatatgaggcacaatcaagagagaagcaaatcatgaaacaaaatgagcatatgatgatggtcatttcaaatttatacgaagaaacggttcatttaaagaaaacgttaaaacatacagagcacattacgcaagaatcatacaggctttatcgtctcttgcatgaacacgaagcagggaagaaagtgagtcaggagctattgaagcttgcaggagaaatccatgaagtgaaaaaggataatcagcgtatatatgctgggctttcgaagctaatttctaaggaaaatatgcaagactatatgaaggcagaagaactcgttcaaattgtactccgcattcaagaaaagtatgcgctctctctagggaaaaacatctcctttatatctgatataaggggcattcatttgcatgattatcatgtgttcatttttttatcgctcattaataatttaatggcaaatgcggttgaagccataaaggatactggaatgatctcactcgtattgaaaggaagtcatgataaaatagagattcggattgaagatgatggcccggggattcctgaaaaaatgagagaaatagtatttgatccaggctatacttctaaatttgatgcatatggaacaccatcaactgggattggattatcctatgtgaaagagctggttaaagagcttggcggtcaaattaaaatcgaacaaagagaaacaaagggaacagcttttcagctaatccttcctatacaaaatttaatacagagagggtgagtgtatgcgatttttcattgcagatgatgatcgtgcaatacgctcgattttaggtcaaatcattgaggatgaagatttgggagaagtcgtagatgaagccgatgacggagttggattagaagcccattcattgaacctaaaaaaagtagacatccttctgattgaccttttaatgcctgctagagacggcattcaaacgattcgtcatattcaccctgaattcaaaggtaaaatcatgatgatttcccaagtagaggcgaaagagatgatggcagaagcctatgaattagggatcgaatattatattcataaacctgtcaatcgaattgagatcgtcagtgtgattcgaaaagtcatggagcgtattaagctggagaaatcgatatatgatattcaagcttcccttcgccatgtgctgccgttagagcctgtaatttctcatgatacgacgggtgctggggcgaaaaaaaggacgatgaaagaggcaggggaatttctcttatccgaactaggaattgtcggagagagcggttctaaggatttactagagatcctgatctacttacatgaaacacagtcagccaattctcatgaggtcaatttcccgccgctaaagcagctctttatcaaaacagcggagaggaagctggatcatggagcaaccgatgtagaagtgatgagggaagtgaaagcggcagagcagcggattagacgagctattcaccattccttgaatcattttgcttcactaggattaacagatttttcgaatcctaaatttgagcactatgcgtcgaagttttttgactttaccgatgtcagccaaagaatgaaagagatgcagaagacctcttcatccgcaggatcgacgggcagagtcaatacgaagaagtttgttcaaatcttttattttgaagcaaagcagttatttgagggaatgagctgaagaaaatctgttggaatgattggagaaaataaacagaaaaagaccgctattcctatgatctgtcgtgatctttatgtatctttgttatttaactgatcattctgatttttcttttttcttgaaaataaaactctcctgtgcaatcgtttgttaaaatagtgaggttagactagaatgtcggaggttttattttgggaaaaattaaacgaaatgcgctctgctcatgcggaagcggaaaaaaatataaacattgctgtggtcaaaagtcaggcggagaacaaacgtctgagcttgtgtttaaggaagctgtacaagttcaaaaggatttaatgaattatgctttctctaagcatcagagagccatcaatcaattcattaatgagttttctttccttgcagatatggataaagaaacgcaacaaatttcagttttccatttgagtgtatggggcattttcttccgtccattaacggatcagaaagaaaccatcttccaagaatttctgacaaagaaagcagaggatattacccgtccgaaaacaaaacaagtggttcaatcatggacaaacatggaaccatctttgcttttattaaatgaaaaaacggacgagtctctttactttgagaatatggtgacagctgagaaggttgaagtagatgtaaaaccggatcaaacagtcttgcctgaaaaaggaagtctcgtgcttggattccctgttcaatttgaagaaaaagcagagtttttcattcaatatacgatgtttgcgaaagagtttacagatacgcttcttcttcaggttcgtcagcttgttgaagcatatgaggcaaatggaggggcacgcagtacatttatgagagaatcattccctgacgtgctgaagtgcatgtttgcgaagcaagaagtagaagaatcagaaacatctgctcaaacagaaggcgatactggtctatcagcagatcgtatggactgggcaagtgacgttcagctggaaacagctaagctgattgaagacggaatgaaggaacacggtgatcaaagcctgacagatggcgctttaactgtgtggaaagcctattgtgatcagaaatcacctgtgatccgtaaagcagcatcatttgctgcgggaatcgaatattacattcattcacttgcaagcgatgccccgctttctcaagcgcaaatagcgaaaaagtatggcattagtgcgtctactgtatcgagccgttttaaagatattgaaaaagcggtgaaagaagagcaagaggcgactgtatagcataatagaaaagacgcggcaccttcatgggccagcgtcttttttgttgatgcttatcttgttttaataaaaccgctcatgtactgcgatgtattataatcgttgaggtcaattttccactgaccatccccattacgtttcattttcacttcgtattcagctgggctggagactgggggaagcttctcgaattcagacgcgtacatgtctaagcttttcttatacaattcttctttagagcggatcttgccgttgtaaaactcgtctctttgcttgtctagcttgtcttttaagttagaagcatcaatgcctgttacttgagcgacaaccttcgcctcgtcatcagagatggttttcacacttgtttctactttggctttatccttcatggtgttttgaatgcgtttatacatagacagaatatcacgatcacttacttcatttccgtacattccggcacttcttttgaagtctttgacaaacatttcgtggtatttattgacgacatccgattggttgtcacctgttaaatcggcaaattgatcgttctttttgtcaaagacaatcatatcggtataagcggatagcgcctttgcagggttatccagctttttcgctgtatccagtattttgtttccatctaggttgatttcgatcgaatcactgtttttcttgatgctgtcttggtacacgaactgatattttttccctttgtctactaggaaataaagagcacctgattgtgatttgcctttgttcaatgaaccgaggtcaaggcggtctttactgccgtaaaattttaaatcagatactttggcatcgtcctgataaagggagaagtcagagttatataatgaaagggctttgtcacctttgtttgtgatcgtcaagttgacttttaaaaccaattcattgtctcttagcgtagttgttgagtcttctggtaacgtatattcgtagctattgacttttacctctgctgtttttgttgatttttgatcagcgttgcttgatttggctgagctctggcaggctgcagagatgatcatcacgaatgaaatcatgaggagtgcacttattttttttagattcacagttgatgctcctttgcttttctttcgtcatttcattcccgctatctgactatgaaaaaagaaacagatagaatggtatattcgggtgttaaaggggaaaatctccttatgacgatttgcactattcattctatcgaaattcaatcatgatgaggaataggttttaatccctatctttgaaagaaatttacacaaacatctttaataaaaggaattttgtaagtctaatatactagttaataagaattaatttatagatttatcatgggtttaaatgttttttaggtaaaaatcttgaagtgaaggtgttaatgcttttagagagatgactatacgtcccttcattttttcagcatctacctgctatgttaattttcagagagcaggatacttgaatgttgaaaaggattcatgggaaaataaggatgattaagcagataagggagatgagcttttgaaaaaggtaacgcttggacgaactgatttacaggtgaatccgatagggcttggtacgaatgcggtaggtggacataatttgttcccgaacctgagtgaagatgccggacgagagcttgtggagacggctcttgatcaaggtgtcaatttcttagattctgcttttatttatgggctgggccgttcagaggaattgatcggtgagatcattgccaaaagaggcggcagagaaaaccttgtccttgcgacaaagggggctcataaagaagtaaacggacaaattgaactggataacagccgggactttttaagagagcaggtcgaaaatagcctgaaacgactgcaaacagattatattgatttatactatatgcatttcccggacggccggacgccgctggaagaagtagcaggcacattaaaggaattgaaggatgaaggaaaaatcagggcaattggtgcatcaaaccttgattttgaacagcttcaagcctttaatcgagatggctacttagacgtgcttcagtcggagtattctctgctgaaacgtgaggcagagcaggatcttctcccatactgtgtcgagcatcgtatttcctttattccttatttcccgttggcgtcaggcctgttgactgggaaatttacgaaggatgcgacatttgatgatattcgagcaaaagacccgcttttccaaggcgaggcgttcctgcaaaacctcgaaaaagtagacaagctgaaggcaattgcacaatcaaagaacgctgaaacggcacacgtcgcactggcttggcttttagcgcaggacggcatcgacgccatcattccaggtgcaaaacgagctgagcaagttctgcaaaacctaaaaacaaacgatgttcaattaacaaaagaggaaatcaatcaaattgaccacattttctcttaacataaaaaaggtgctcagctgcaccttttttttatgacatcgtaaggggaattttgatgacgagccgcaaatttggagaacggtaagtgaaatcaagtttaccgtctgccttttcaacaagctgatgaatgatatacgtccccattccttgatgatcgccgccttttgtcgagcgcccataggttttgaacaaatggtctaacacgtgtttttccattccttttgtgctgttctcacaatggattaaaaagagcccgctccgaatagaggtcgtgattgagatgcttccctcgttcccggcttgcttcgcttcaatcgccgcatctagggcattatcaagcaggttgccagtaaaactaacctgatccgccttagaaaacggaagcgatgaaaaaggtgcttgaaggtctagtgaaagggcaatgtcctctttttcagcccgctcaaaaaaggagtgcagggttgaggccaaataagcattttctcctttaatccatgggaaatgtttcacgtattgctgaatcaaatccttgatctcatgttcgtcgttcgacgcggaaaaggcatttaaatgtctagctgtttcatgatgtttactgcgcagctcaagcagcaattcattggttcttgattctgcgttgatcagctcttgaagccgtccatttaaccgtctctccgtctgcatcatcttcaatgaaaggatatctgctgtcatgatgattataaaagccaaaagagagctcagcccatttccttgcgtcagaaaaagggaaagacctgcacaggtgaagagcacaaaagcgcccagcatcacataaccactcacatgagacaaaaaccttttgtacatgaagaatgtataaagacaaatcacacaaaaggtgaggagccacagcaccccagatgatagcggcagaaaagcttcaacagctgcatgaaatgcaagacctagccatatgagagcatacatgcggaatccaagatagaaagcgttcacgttcgttctccttaaaaatagtatttcttaaagtattctaattgctgcttggtcatcatggcttttttatccgtaccttcaaaagacacgataaacgaatttttggcatacgccgagaagttcttaatgtaatgaatattgatgataaacgatcggtgggagcggataaaatctctttcagccagatcgccttttaactcgtttaatgtctgatatgtctggatatctcctgttgttgtgacaatggtggttgaccgtcctgttcgctcaacaaaaatgacatccttcttttgcagcacatgaatatctgactgctgcttaatgagaagccgtccatgaatgcttttctcctgcttggtggacagatagcgatctaaggatttggcaattcgatcggcttgatagggcttcataatataatcatgaacatttaaatcaaacgcatggaccgcatatccgctgtttcctgtcacaaatacaacatcgacattcagtgcgtgagagtgaatgagatccgctaattcataaccggacattccgggcatttcaatgtctgcgaacaacaggtcaatgtctccctgtttgaccttctcgtatgcatcctctgctgactgcgtgacaaagacaatgtccacagcctccattctgcccacaatggcatgcagtttttctaaatctactcggtaatcatcaacgagacctacttttatcataaaaatcacctgtgactcttcttattatttgtctattttaccatttgtttttttaaaatagatcatttcaagacagaaaaaggacgtttcgcgacatttttatgtcagggaagcgttattttttctatcatagacttagaaagttgaaaggggcgaaccaaatgattactctcagcgattgcagctgctggtttaaagataagaaaaaagtcgtgaaagcaatgaaacacatgacgttctctgtgaaggaaggggaagtcgttggcatcttaggagaaaatggtgcaggaaaaaccacattattgcgcgccgtagccacattattagagcctacgcacggaacagtcactgtcgcaggctttgatacggtgaaagaagcaactgaagtgaaaaagcgaattggtgttttgtttggcggtgagacggggctttacgatcgtttgacggcacgagaaaatcttgaatactttggcaaattatatggcttagatcagcatgaaatcaaagcaagaatagaggatctggcaaagcgttttgggatgagacaatatatggatcgcaaggtgaaaggattctcaagaggaatgaaacaaaaggtggcaattgccagaaccttgattcatgatcctgacattatcttatttgatgagccgacaacaggcttggatatcacatcaagtaatattttcagagactttattcatcagctcaagcagcaaaataaaaccatccttttttcaagccacatcatggaagaagtcagccagctttgtgacagtgtcatgatgattcatcaaggagagcttgtgtacaaaggaacacttccagaattatatacacaggaacaaagtgatgacttgaactatatctttatgtcgaagctcgctagggggatttcataatgtggaaaaccgtatttttaaaagaaatgacagatgcgctaagggaccgaaaaaccttactcttaacagtgctgattcctcttttgacgatgcttggactggtgttcttttatgaaagcatgattgcagatccaggggatgaaacctatacggtcgcaatcaatgaaaagcttccaactgaaatgaatcaaatgatcaaagaggtcaaaaacctcacgcttgaaacatttgatgacccgcagcaagctgtcaaagaagggaaggcgaatgcttacctggaaatgccgaaagaggctgacgacatgcttcagcatcaaaaatcatttgcgattaaaattcatgggtacacaacagatgatgattcggtcatcgcggttcaaatgctgcaatccttactggagcagtatcaaaaccaaatcgtagaaaagcgtttagccgctgatcaaatcaatacatctgttattcatccatttcaggtgcaggccgttgatgtagaagaaggcgatgaaggggaaaatggaatgaccgctatgcttttgtcgattctccttccgatgattttggtgacctccgttatctcaggagctttgccagctgcgcttgatattgtagcgggtgaaaaagaccggaaatccattgaagcgttgttcctgacacctgccagcagacttcatattctcataggaaaatggcttgctgtctccatgttcgggattttaagtggaattgtggcgatcggcatgctgcttttatccacgctgctctttacagaaaagctaaaacaagcactgaactttggtgatcaaatgtggagcattatcgccgtcatgtttgcggcgcttatcatcttctcattcatggtatcgatgattgaactgctgctcagtgtcgtttcaagctcagtgaaagaagcgcaatcgtacatgtccatgatcattacattaggtgtgatcccaatgttctttaccatgagagcaggtgctacgcagctagatacgtactactttgctgtcccattccttaatattcatgcattgtgtaagcaattgatgtttggcatcatcgatccgatgtccatcactctgacactcggctcctcagccctcgcagtcgtcatcttgtttgtcatcgtgagaagcttgtttatgaaagaaaagtggatgcttgcaaaataaagaaacgccctctatgatagagggcgttttcaagtgaatgccgatcaccgtatgttttagtttaagaaaccgaattgatccaagttctctaaataaaattgaaaatactcgttatgaatatcaactggatattcttctaactcattttcaataattgcacctacaattaaagcatttaaatacctatcaagcttttcgcagctagctcttacttgagattctgaaatatataatccatctttactttctaaaatgatatcaattcttctaccttcttgttcatcaagcaataagtgattatactcccattctttgactctcttggggtttaagggatgttcacgattatcaagtatttcttcacgatgattctttttttcctcatttgaaaacaattgaatcaatatacttggatcatctatgacaaaacatttatatatcttattatactcaaagtgatcatcatttactaaatctaaaatttttgtttttgaaaattctctagctttaaatttagacgttatcatctcagcgactcgttctttagtaaaaatcaattgatcttttttatataaatactgtttatatagcttttcgtaattatacattgttcacctctattaattatttaacaggacctccgtagaatgaatgagcttttggagttcttttatagggatgccagtgataataataccatgagagcaggagctacgcagctagatacgtattactttgctatcccattcttaatattcacgtactatgtaagtaattgatgtttggcagcgtgagaagtttgtttatgaaagaaaagtgaatgcttgcgaaataaaaaagctaaaaacttgtagattttttctgcaagtttttttatatccagagattcatataaaagaggttcacgatcggacaaaagaaatggcataatagaaggcgaaatgacattattatcctaatttaattaaagaggtgattggtgtatgtcttatcaaacagatgatgatgatgtgctagagttatgtaatatatatgctcaacaaacacaccattttgaagcgtttattttgggaaacaggaaagggttattggaattaagaaaagcgatagatgaggcattagaaacgggtagttccgttgcacatttatatccatctgattttgaaggatatgaaacgtatgttgctttagtagatgatgagcaaaagtttgagaaattaatggacccttatgtagaggaatacgcacaagaggaggatgcggttgatccggttgaggtgataaaagagtatgaagctgtaaaagaaaatccttcataatagaccgtatcttactttcttggctgcaattcggaactaaatatagggatcaaacaaaaaacccccggcatcgggggtttttcattagttcttgatgaatttttcaactaatgagcttgttttgtaatcgttcaaatcaagtttccattggtcgatgtcatttttcttcatgttgacttctactgtttcttcagaagatgaaggtcctaattttttgaactcttctgggtagatcgagagtaaatatttttgtgcttcatcataagacgctgtacggtttttgctgtagaactcagttgctttttcttttaaacgatcaacaagcgggcttgcgtcaattggtgtgagagttacagtcacaacagctttatcaccactgatggcttttgtttttgttgagacttttgatttttcagctaatgtttcttttacagcttttagaagcttatcaaggttttcgtcctttgctgagcttgaagaaatacctgatgacgtgatgtagccttgtttgaatgatttatcaaattggtttacaacagttgatttgttatcacctgttagtttttcgaactcgtcgttattcttaccaaaaatcatgacatcaatataagaagaaagggcttttgcagatgcttgaagtgtatctgcttttttcattaagtctttccctttaatatcgaattctagtgttttgtcatcttttttagaaccactgcctggctcattgtacacaagctgatagtctttgtctttatcaacaacaaagaaaagaccgccttttgatactttgtctgcatttagagagcttgaagataatacttcgttgtagtcatctggagaaatcgtagacacctgtgcgtcatcttggtaaagcgtaaagttgcttttatcaacattgagaggctctttgctgatattttttacagatacattcacttttagaacatactgatcatcctgtacagatgtatcgtattgaggtggtaatgtgtactcagcactttctacctttacctctgctgcatcaagggattttgtatctttttcctttgcagctgacttttcttttccaccactacaagcagcagcgacaacagtgacacacaagatcagaagaaacagggataatttctttttaaacatgacgtgttttcctcctcgggtttatgatgaatttcattggaaagctttagttcatatcgttctttttgcacaaaaagaaaaatactgtatgttttttactgtagaatggagcgaaagtactgtcaatacttcagtgcgtttcaaaggtcgcacagcttcaagtagtaaaaatgacactaagttgagaggagaaacttgtaatttattatttgatatctcctgtaaaaactcaacattttatattttaaggttttgagtcggattattgaataggttcaaatgactgtttttgacgaaggtgtagcaattagaaggatttttatgacttgtaaatgagtctatagtaatgaatattttttcctgttatgtgtatgatcacttggtttgtgtgttgttggcagagagacacatgtccagcaaaatgttgaggtgtttagacaggctctcgacactgaatgtgtcttttcccgtcaaaatggcagtcatctacacagaaagaccacataaaataaaagagaaacgaaatggaggtggatgtatggcagtggtaagagcgacaagctctgatattgatctaatggccagactgctgagagcggaggcagaaggtgaagggaagcaagggatgctgctcgtaggaaatgtaggcatcaaccggttgcgtgccaactgctctgactttaaagggctgcgtacgattccacaaatgatttatcaggagcatgcatttgaagcggtcacgcatggttatttttatcaacgagcacgagaaacggaaaaagcactagcgcggaggaatattaacggagaacgattttggccggcaaaattcagcctttggtattttaaaccgcctggaaattgtccaccgacttggtacaatcagccgtttgtggcaaggtataagtcgcattgcttttatcagccaaccggtgaaacatgtgaaaatgtctataacaccttttagcttgatgaacagcacaatcctcttagtcaacgattgcagagggttgtgtttttctttttttcaaaatgggtaaccattgtgtatcaacaagatgaagcacgtgattgggggaaatgaagatgtatcaagatttaaaaggaaaaacagccattgtcacaggttcttcaaaaggaatcggacaagccatcgcattacgatttggacaagagcaaatgaatgtggttgtgaactataaaggcgatgaagagggtgctgaagaaacggtacaagccattcagcagcgcggaggtcaagcggtgaaagtacacgcagatgtctccaaagaggaaggaattcaagccatcatggatacagcactggagcatttcggtacagtagatgtgttcgttaataattcaggctttaatggcgaagaagcgatgccgcatgagatgacgcttgaacaatggcaaaaagtcattgatgtcaatatcacaggcgcctttttaggagcaaaggctgcgatcgcctatatgatggagcatgacatcaaagggtccattttaaatatatccagtgtccatcaggaaataccgcgcccgttcaatgttcactattccacttccaaaggtggaatgaatatgatgacgaagacgctggctcttgattatgcggaagcagggattcggatcaatgcgattgcaccaggtacaatgggaaccgaatcgaatgatgatttgcaggatgaacagaaaaaacaaaagcagcttgaaaagattccgatgagagcctttggcgaaccgaaggagattgggtccgccgctgcattcctcgtatctaaggaagcttcgtatatcacaggcaccaccttatttgtggatggaggaatgacgctttatccttctcaaatcaatgattaatacaaaaagcatccgcccgatcagccggcggatgttttttgttcgtagcggtgtgctgttttggctggtttgccgagcagcatcggatacttgctcaggaaggagatacacggcaccataagcagcaaagtcccgatcgtataaaagagtgtccaagagagctgcgctgtatccgcaatattgataccaagtccataataaacaaatgctttcatgatatcgatgccggcaaactgcaagacaagaataacaatagaatttcgtccgagatacgtcaaaattggggacgttttgaatttaaagcttaaataaatcacggcagctgaaccgagcagtgcacatgcatagaaaagaaagagatcgccatagtcgttaacgcgcatatcgatccgtgaattcaagctttgcatgtaagccgtcagtacaagcagacctgtacatagaagaagggttggatctgtttttaattccacaaaccattgcttcgccaaaaatccaattgaataaaacacaacggccgtcaaggcgacattggcattccaaggaagactttggtctaaaagcaatgtagagacatatccagcacctccgcaaaaaacggtcagtaagatcaggacagcaggtttcccttttgtcagacggtgcataaagaaaaatataatttccactaaaaagagcgtcgttaaaaaccagatggcagggttatgcgtgagtctagcttcatctgcattggatataaaaatacctgtaaacggaacgaaagggtcaatatccgtttgtcccttaaaggcaaaaaaacgagtaacggagaaccagaaaacatacgtaatgatggagaaatagagatagggtaagagtaagctcttggctttcttctgaataaatgacagagcagggtgtgaggatgatcgaaacatcatgcctgatagtaaaaagaaaagcggcatatgaaaagagtaaatgaattgctttaaagaatctggaatgggcacatgcgccatgaccacgagcagaatgccgattcctttagccgcatcgacccaatcgagtctctttttcatggcctgtcatctccttccttctagcgtcgtaaacgattctttgaatatgtacctctactatataaaaggtacaccccttatgcgtttacagttcgctaacgattagaagacacatttgcgatcagatgacagacggaaggattttgacatcttgatgttacatttcccattttctatgacaatgaaaaaaagaagccaaggggattggcttcaaaataattctgcgattcgtttgaaggagcgctgtttttcgatcggatcaaaggaattgtttagaatcatgatgtcatccgtttgatagcggtccatcaagctaagtaattgctctttcaccgttgcctttgagccaacaatcatccgctggcggttttgtaacacttttttcttttcctgcgtggtgtagtgataggaactggcttcttctatagaaggtacgcggctgtccagtcctttttcaacacgcagcagccataaatctgtactgctggcgatctggtcggcctcttcatctgtttcaccacagatgacaaaaacagcaaacatagcgtgcggctgcccggaaaagacagatggagaaaagtgagaccggtacgtctcaaatgcttgcttgccgcgtgcagggtggataaaatgaccaaaaatatagttgatcccaaactccgccgcctgcatggcactattttctcctagcccaagcagccaaaccggcggatgagcatcaacaagcggagaagctttgactcctgcatgtgggtgcccagaaggcaggctgtctgataagtaaaatagaagatccttcagctgacggtcaaactgagacaggtctttatgcacgccgtccgtcaaagccagtctcgtcctttcaatcccgcccggagatttgccgacaccgatttcaattcgtccaggataaagggcctcaagctgccgcgtgacctctgctactttaaaagggctgtactgcggaagtaaaatgccgccagacccggtacgtaaggttgatgtatgagcggcaatatgagccattaatatttcaggtgctgtactagcgagccctcttgtgctgtggtgttcagcaaaccaataacgctcatacccaagagtttccgcaagctgagccagctgcgttgtgtgaatcaatgtctcttgggctgtctgacctttaggaatagcgacttgatctaatatgtgaagtgatggcatcatcaacatcctttcatcgacacggtccatgttcttcatctcaagtataaagaaatccatgaatagaaggaaacgaaagggtttatctctcgatcgcaagcttttatattttctatatcaacatataaaaccaagtgaaatgatgcctacacttcgttcattcagctagagctgcttaccgggaacattcgacaatgtttcacatgaaacacttcatttacgacatgaaccattttcaacatggatctttcgttaaaaaaatatcatctgtttgaaacctatcttgaacatagatcgtatatactagtaaatagaaaaaagagtaagaggctccaatgtcatatcatgaattttgtcgaattttcatgtatgataattttaatagggtccatcgcttaataaatagatttttattatgctggaggagtgattgatttggcgattacattagaaaaaggtcaacgtattgatttaacaaaaggcaaagcagggctaacgaatattcttgttggacttggctgggaccctgtatcacaaggcggcggatttttaggaaagctgtttggcggcggaggcggcgctgatgttgattgtgatgcttcagtgctcatgctgaaaaatgataagtttacggaaaataaagatttgatttattttggcaacttgaaaagcaaatgcggcagtgtcgagcatacaggtgacaacctaactggtgaaggagacggagatgatgaacaagtcctcgtcaacttgagcaaggtgccaggcaatgtgaataaattggtgtttgttgtgaacatctatgatgcactaagaagaaatcaacattttggtatgattcaaaatgcgtacattcgcatcgtggatcgttcaaacaatcaagaattagtgaaatataatttaaaagatgagtatgcagggaaaacatcgttaatcgttggagagctttatcgtcatgagaatgattggaagtttgcggctgttggaaacggtacaaatgatgcgaagcttgccgatattacgagaaactatatttaatcagaagggagagattcctagtgggaatttctttagcgaaaggtcaaaaaattgatttaacaaaaacgaatccaggtttaacaaaagtggtcgtcggtcttggctgggacgtcaataagtatgacggcggacatgactttgatctagacgcaagtgtatttcttttagatgcagcaggtaaggcaagctctccatcggattttgtcttttacaatcaaacaactggcggtggcggcagtgtcgtacatacaggcgataaccgcactggtgaaggagacggagatgacgagcaagtcaatatcgacttatcagctgtaccagcgagtattgagaagatttcatttgtcattacgattcatgatgcggaagcgcgcagtcaaaatttcggacaagtaacgaacgcatatgtgcgtattttaaatgcggcatcaaatgaagaactcattcgctacgatttggcagaggacttctccatcgagacagcgattattgtaggtgaattataccgtcatggcggggaatggaaattctcagctgtcggatcgggctatcaaggcggacttgcccgcattgcaacggacttcggtttagatatcgggtaacggctagtttcatattttcaaagataggagaggtacgaatatggcgattcagctttcaaaaggacaacgtgtcgatttaacaaaaaccaacccagggctgacgaaagtgatgatcggtcttggctgggatacgaataaatattctggtggagccgaatttgatttggacgcttcggctttcttagtcgatgcaaacaatcgttgtcagcaagacacagattttgtcttctataataaccttcagcacccaagcggcagtgtcactcatacaggtgataaccggacgggcgaaggagatggagatgatgagcaaattctcgttgatttctcaaaaattcctgctaacattgatcgtatcggaattacagttacgattcatgatgcagagacgcgcagccagaattttggacaagtctctaatgcgtttgttcgtgttgtaaatgaagagggcggggaagaattgattcgctttgatttaggggaagacttctcaattgaaacagctgttgtggtatgtgagttgtaccgccacggaagcgattggaagtttaacgccatcggaagcggattctctggcggacttgcagctctttgtcaaaattatgggttagaagtgtaaacgatagaaacaaatcgattcaagtggcgctgccaatgactcatatgagggccttttccaaagtgagaaagaaacagcggtcaagaataacagcaggcgaaagcctgctgatgcttctacacttataggaggaaaaccagttggatattttgaaacatatgttggacacgtatgcctcgttttttgattggcatatgtgggcagaggtattaacaaaccctgtctcttgggggcttattgggacccttgttgtgcttgaaggattgttatcagcagataacgcgcttgtattagctgtcatggtgaaacatttaccagaaaagcagcgtaaaaaggcattaacctacggattaattggcgcttatttcttccgttttctattcattggcgtagggatgctgcttattaagttctggtggattaaggtcctcggagctgcatatttagcatggcttgtcattaagcacttctggttaggtgacggcgatgacgaagcgaaggaattgaaaaaagaaggctggatggttcgtgtatttggcgtgttttgggcaactgttatttctgtggaaattatggaccttgccttctcggtggacagtattcttgcggcattcgctgtatctgaggaagtatggattctgctattaggcggaatgcttggaattctcatgatgcgtacagtggcacagttattccttgtcctcattgaccgtattccagagcttgagaatacagcgtttattctcattggaattattgccatcaaaatgggcttaagtgctgctcatattgaaattccgcatgtcgcattctttgcaattattatcctagcatttatcgggacgtttattgttcataaaatcaataagaagaaacatcaagatgtgacaaacgaagctgcggcttcaaaagaagaataggacgatcaaaaaggaatggagttgactagcggctccatccttttttgaatcatcaggtcatttattttctctaaacaacaggaggtggcacagcatgcggtattttcgatttttatcagaggcgaggcagcacgatctttttttcaagcggccaggggcgatgcattcactgacaccgaggcatgtacttgcgcatgcattaggtgctactttgtatatgcctgcgacaagacaagatatagcagatatgctgctgtcgcagaaatatgaagcgctttgctctgttgtattttgcttggaggatgccatcggtgatcaagaagtggacatggccgaacagaatctagtggcacaattggccagtctcaaagagaaagtaacgcatgctcctgaaacggctgaacaattgcctcttttatttattcgagttcgttcgccgaaacagctgcttaaaatggcagacttgctcggttcctctcttcaattacttaccggttttgtgttcccgaagtgttcagttcataatgcgaaggattatttggacagtctgaaacaggcatcgtcccaaacgcggacaacactttatgggatgcccattttggaaacacccgatttattagaaaaagaaacaagatatacggtgttgtctgagttaaagcagatcttgctgaatgatgaagaatatattttgaatattcgcattggggcaacggatctttgcggtttgtacggtattcgccgtgatcgtgacacgaccatctatgagatcaaattgattgcagatttaatcacagatatcatcaattattttgggcgttcctttgtaatttctggggctgtgtgggagcattttggccctgctcgaaaggaacaaaagccattcatccgtgcgctttctcataggagcggtgaaccgtctttatctgaatttgatgacgtacaaggtttactcaaggagacaaaactcgatgtggctaacggcattcatggaaagacggtcattcatccaacacatcttaagccggtgcaaagtatgtatgttgtgacgaaggaagagtatatggatgcattaagcattcttgaacatgcagacggcacagttggcgtaatgaagagtaccttctctaataaaatgaatgaaacgaagccgcattaccggtgggcagagcacattttaattaagtcagatatttacggggtgtttcatgaaaatagaagctatatcgacatactcacagaagcacaagccgcatacgctgagcatcttggaacatatggaagttgagcttgatctcaaaaaaggtgcgcttcagctggaaaaagagcatctttttgacatggcagcaagagtgaacaaaaaaagagcctttttattcgttagtaaggtgctcggtaagcatattcctgttcatccagtaaaaccgcttcttgtctcgggtcttttagccatggcgtatgcacaagagcaaacaggcaagacgtctccgcatcaagaccttttagtagaagcactcaagacggatgaccacacggcattaactaaagcctacgaagcactcaaaaaagagaagctttcatcaggaaaacagccgatcgtgatcggctttgcagaaacagcaacagcactgggtcatggtgtgtatgacgtaatagaaggagcatcttacatccatacgacacgtgaacagctgctggaccttgatccttcattggtatttgaagaagagcattcgcatgcaacggatcagctttgttatgcagacgaagcattacttcgcacagaccgtcccatcgtgctagtagatgatgaagtcacgacaggccgtacgaatatcaatatcattcgggaccttcatgcaaagcatccgcggcattcttacacgattctttctattttggactggcggactgaggagcacgagaaagccatgtgtgagcttgaagaggagcttggtattcacatcacatcattgtctttattaaaagggcaaatggtctttcggggcaaaacgctggatgagccagcttattcgtatgagattgctgagcaaaaggatctgccaagtctctctgttcactctcttcaatctttctttaagcacgagccgtatgcactttctcatgcagcaaattcggcgggtcattcgccatatatacatgaaacgggccgttttggtttaaacgcagcagatacggcagccatcgaccaagcagctgcacaggctgggctgaaactgaagaaggaacgtaaaggaaagcagacactttgtttaggaacaggtgagctgatgtatgtgccaatgagactggctgcacatatgggagaaggcgttctctttcattcaacgacgagaagcccaattcaccctgttgaaaaggatggatacgctgttcaaaatgggtttacctttgtgagtccagaggatgcccgaattcagcactacgtgtacaacataccaaaagatcaatacgatgatgtatttctcttttttgagaaaaaggtctctcaggaggcattgcgtccgcttgttcacttatttgccgagcggcatgtgaagcatgtgcatattgtgactttatcagacgaggtgaaggtgaatggctaatgtgtatacaaagatgggaagctatccagagcaggatgtaaccttcttactcaaagatttatcatccattgagatggagaaaagtacagaagagcgggagcgttcgattcagagcggtgcgcattattcagaaatgctgccgattgagtataaaccaacggaatcttatatggatttattctatcaatctctgaaagaaagtaaggaaaaggtagcagaagcagtagctgtggtagcagaacagattgtgaaaaagcgaggcttccaaacggttctttgcagtttggctagggcgggaacgccgatcggggtgctcatcaaacgatatattcgaaagacatatggtcttgaactgcctcattacagcatctctattattcgtgaccgaggaatagatgagaatgcgctgcattatatgctcaaggaacatccgggctttgagattgcctttattgatggatggaccggaaaaggtgcgatttcgagagagctccaaaaagctgtgattgattttgaaagaaagtatgatattcgtctttctagtgaactggctgtactagctgatccaggctattgtacaaatgtctacggaacgagagaggactttctcattccaagtgcctgcctgaattcgacggtatcaggacttgtcagtcgaacggtactaaacaaccgctggatcaatgccgatgatttccatggggcgaagtattatgaagagttgcttgatgaggatgtgtccaacctgtatgtggatacaattgaagaagcattttctagcctcgaaccaaatgtacgagagaaagcagagaccatcctcacacagggaatgcctgcggactggcgggggatggcttccattgaagcgatcggtcaggagtttcaaattaaaaatacccatttgattaagccgggtgttggtgagacgacccgtgtgctgcttagaagaatcccttggaaaatcctgattcagccggggtctcaggagaagctgaagcatattttgcttctggcagaggacagaggcgttcctgtcattgaatatgccaatatgtcctatacgtgctgtggacttattcgtccgatggaacagacgtcatgaagacatgtgcgtttgccagtgatttagaccggacgctgatttactcacatcgagtgctggaccagtatgagtatgaaggagattatgatttagttgaggtgctggacgaacgaccgctttcctatatgtcggttgaaacgaaaaaatccttgcagacaattcatcaattaggctggttcattccagtgacgacaagaacgactgctcagtatgaacggatcaccttctttcagcaagagctccaaccggagtatgccgtcacgacaaatgggggctgtatccttcatcacggcaagccgcttgaggattggcaggccatcgttgatgagaggctcaaagcgtgtatgtcagtcagagagatgctaagagccatctccgaccttccagttgcggcatgggtgaagcgtacccggacagcagaggggaaatttctttatttgattatgaaagatgagtatttgtctcacattccacttgctgaattgaagctgtggggcgaggagagaggctggcaggtttctcttcaaggacggaagctttattttattccggagccgcttaataagtgggatgctgttgcttttttaaaggaacggctggagcttgaatatgtatatggtgcaggcgattcccttttagatgcaggtcttattcgtcaggcggatatgggctttgccccgaggcatggggaagtgcttgactttgacccattacttgagccgacagcagcatctggcatggcagcagcagatgaaatcaccgcttgtgtcatgaagcagatgacgaccgtaaaaaagccttcgattcgatagcagaagtagaagggtgaatgatatgatagtagtagctttcgagaaaatataggagaaaggaaggagcggcgtgagttataaagaaatcgatgtcaaccatacacgggcggagcaggaagcctggaaaaacgtgctgaaaaagccgctccctgaaagagacggttatgtaaaggacgagcatacattgtccttgccgcgtctcgccgcccgggtccttggaactccgcatgatgcaaccgattattttatttatttacatgaattatatgaaacagatggcgttcatattttaagtgaaacgctcaatcgtcatattgagccggagcattttcaagcgcttcaacgcattcatttgattaaccaagaagaaaagggattgtccgtgaatcgctttgtggcttttttagatggtgaacagctgattgtacgccatccaaaccctgtgatgaaccggcatatccgcctttcattgatcaaggtgtttgagcatttcaaacagatgcatgagggtggatttcagcatcccgatttccgccgggttctgctggatgtagtgaagttttcaaataatcatctagatccatggctgaaggaagtcaatatagaagaaaaaatgccggctgtcatttggtatggagaggcgaataaaagtcagctttattttctttactatgtcatgctgattggctgtgatgttgtgctatttcatccagagggcgaggattcgttccgcgaattagatccagaagaaaagctgacttttattgatcagtatccgggaaattcaaagcttgaaccgttccctactgaaaagcctgagaggaaatcaacggtggcgtaccgctcgacaagagagcttgaagaggtgctccacacggaagattcaatgctgtataagccgtggcaattcagagatcatacccctcattccattacgctgaagacaacgtatgatgagctgtttttaattgcaaaggaacgttcctttattcgccctaattttcaagcagaccgggacacgatacagattccgaatctctttgcgaaaatgatggggatcacacgagacaagcgtgaatactgggatcgtatccatacgttaatggaagggaaagagacgaagaccattcgccattttccttttacgaaagaagtgtcttcgaattatcaatttcattatcagcatgccctttcttctgctggagagattgatcctgaattattaatgaaaagcaatgtatggcagttttctcatctatatgagggcgcgcagcgtgcgatagcagaggcgatatctcgaatctgtcaccatccaaagctattaaaagaaggcaatgagaccgaattagatgtccgtatttatttattcaaacagatactgcatatcggccaggagctcattgaactcattcaaacctttgattatgcacaaaccgtaccgaaagtgattttataccatacggaatataatggtgagctgactcgttctgatgcggctgccctcattttcctaaacgaaatgggggtggatctcttcgtgtatcatccggcgggataccagtgtatcgagcggtatatagatgaccaattatttgatacccattggcttgatgagatggtcatgaatcaggagtttaaagagccatccatcgtcagaaagttatttcaatccattaaaaatcgataaggagatcaaagcttatgacaaatacaaacggaaatgacatcatttcaattgataaagaggaaatctccattgagaaggcagacgatatccgcgttcagcttcgaaatgaaccagaagtgcaaaatattgcgagacagatcgatgcgaaaaatcagctggagctgcttgaatacggaaaacagccggccgttgaaatctctaagttctctgatcgtattctttcgatgatgcgttcaacaagtgtcactgactcaggaacgatgctgacgcagcttggaaaaattatggatcgttttgataaaaatgattttgacgagccaaagggtggtttgttgtcaaaaatctttaagcgcggcggcagcatgattgaaaagattttcagtaaatatcaaacgctcggtgcagagattgaaaaaattaatgtagaaatcagtaaatataaagacgaaatgactaaatcgactgtgacgcttgaagaaatgtatgagcataacattcaatactatatggagcttgaaaagtatgttgttgcaggtcaaatgaaaatcgaagaattaaagcaattggttccttcttatgaagaaaaagcggctagtggaaaccagctggcacaaatggagcttgatacacttcgtaacggcattcaagcattggaagagcgtgtatatgaccttgatatggcacggatggtggctcttcaaacggcaccgcaaattcgtttgctgcagcgtgggaatacgaaattaatcggtaaaatcaactcagcgttcatcatcaccattccaatttttaaaaatgggatcattcaagctgttacagcgaagagacaaaagcttgtggctgattcaatgagtgagctggatagaagaacaaatgaaatgctgaaacgaaatgctgaaaacatctcaagtcaaagtgtggagattgccaaattgtctggacgtccaagtatcgacattgaaacgatcgaatcttcctttaatacgattgtacaagggatgaaagagacgaaacagatcgaagaagaaaacaaacgattacgcgaagatggaacaaaacgtatgcttgaattgcaagataatattaagcgggctgccctagagtcctaaaaaataagctgtctgtaactaaagttgcaggcagttactcatgaattttattaaaatttgaagaaaaaaggtttttatgtgaccattttcgggtaaatcatgttcaggggaatggttcgcccatgtttgaaaaagtccgctatggtgaggattcgagttattttttagcacaattaggaatttccagtaaaatattgtctgatgagaggaaataccccgtaaaatatgtagtttatgaagcattctataggatttacgagtaatacggcgtataaactctaatcaccagacctctatatggaattcatacatattgtgcggaaataagcgaattctaaagattgttcgcatcataacgcttatgttacggttataaagatgctaatttggagggaaaatatgaattctgaagagagaactatcaaaatcaagataaataatgtatctaaaattttcggtaaaaatgctaaaaaagcatctcaaatgcttggaaaagggaaaacaaaaagagagattctaaaagagaccggcgcaacagttggtgtcaatcgagcaaattttgatgtgtatgacggcgagatatttgtcatcatggggctatcagggagcggaaagtccacacttgtgcggctgctaaataggttaatcgaaccaacctccggagaaatatttattgatggggatatgataacaaatatgtcaaaggatcaattgcgtgaagtcagacggaaaaagatcagcatggtcttccaaaacttcgcattgttcccccaccgtacgattcttgagaacaccgagtacggtcttgaattacaaggtgtagacaaagaagagcgccgctcaaaagcgcttgaatccttaaagcttgttggacttgaaggctttgaagaacagtacccaaaccaattaagtggcgggatgcagcagcgtgttggattggcacgtgcattagcaaatgaccctgatattttattaatggatgaagcattcagcgcactcgatccattaattcgtaaagatatgcaggatgaattgcttgagcttcatacatctgtaggaaaaacgatcattttcattacccatgatttagatgaggcgcttcggattggcgaccgcattgtgctcatgaaggacggaaatatcgttcaaatcggaacaccagaagaaattctgatgaacccatcgaatgaatatgttgaacgtttcgttgaagatgtcgacctttctaaagtattaaccgctggtcatattatgaaacgtgcagaaacaattcagatcgacaaaggggcacgtgttgcgctcacgctcatgaaaaaccttgggatttcgtctatctatgcagtagataagaaaaagcatttattaggtgttatttctgcacaagcagcgaaaaaggcagcagaaatgggagcgtcgcttgaaacagttctcgataaagaattcacgacagtattggaatctacgtatttgacagaaatctttgacgcagtgtctgatgcagcaaacattccgattgccgttgtcgatgagaaaaacagaatgaagggtattgtggtcagaggtgcattaattggtgcgttatcaggtaatgatgagtatatcaacatgtcttctaacaaacttgaggaaattaaaacacaagagccttctgcacaggaggtagaataagatgtttagtatgagtgatttacctagaattcagttcgcggattacattgatcgatttgttgactggttaacattaacgtttggtggtttctttgatggcatcacaaatggattagcaggcacagtaaatggaattgtggcagcacttggtgtgattccatctattattttaacccttatttttgccggcattgcctggtggatcagtacaagaggagttgctcttttcacacttattggatttttgctgatcgactatttaggctactggcatccaatgctacaaacacttgcgctcgttttgacagctgtggtcatttccatcgtgatcggggttccgatcggtatttgggcatcacagaaggaaactgtgcgtaagattgtaacacctattttagatttaatgcagacaatgcctgcattcgtttatcttttaccagcaatcttcttctttaacattggcgttgtgcctggggttgtggcatcagttattttctccatgccgccaacgattcgtatgacgattctcggtattaaacaagtaccagctgatttaattgaagcaacagaagcatttggttcaacgacattccagcgtttattcaaagttcagcttccacttgcaacaaaaaccatcctagctggtattaaccaaagtatcatgcttgctctatcaatggtcgtcattgcggcaatggtaggtgctccaggacttggttcggaagtatatagtgcggtaacgcagctgaaaacaggaattggttttgaagcaggtattgccattgtgattgtggcgattacactcgaccgtattacacaaaacattaaaacgaaaaaaaccagggggaatgcttaatgtggaaaaagtctctctacattgggatgaccgccctgcttgtctttttactagccgcttgtggcgtgaagtcagattcaaatgcgagtgcagcacagcaggtgaataaaaccattatcggcattgatccgggttcagggattatggcgctaacggatcaagcgaaaaaggattacggcttagaggattggacggttgtgtctgcatcaagtgcagctatgaccgcaacgctcaagaaatcttacgaccgtaaaaagccaattattatcactggctggaatccacactggatgtttactcgctatgatttaaaatatttagaggatccaaagaaatcttacggtgaagcggaagagattcatacgatttcacgtaaaggttttgcaaaagatcagccggaagcagccaaaatgcttagtcaatttaaatggtctcaagatgacatgggcgaagtcatgatggatatccaagatggtatcaatccaaaggatgccgccgttaaatatgtgaaaaaacataaagaccaagtagcgaaatggacaaaaggcgtgaaaaagtcgaatggtgacaaagtcaatcttgcctacgttgcgtgggatagtgagattgcaagtaccaatgtcgctgcagaagtactgcgtgagctcggatttgaagtgaccttgactcaggtggaagcaggtccgatgtggacagcaattgcaactggaagtgcagatgcatcgttatctgcttggctgccaaatacgcataaaacgtatgcagcgaagtttaaagggaaatatgatgatctaggcacaagtatgaaaggtcttcgcatggggctagttgttccgacatatatgaagaacgtcaactcgattgaggatttgaaaaaatagcctatagtgatgaggttcccttataatagaagggagcatatgaaaaagcagtctgctcaaaaagcggctgcttttttcttatataaggatggtggacgagttgtcgatgatggataagccaatcatgattttcctgcatggcggaggagtcagcagctggatgtggcaggagcagatggaaacattcaaggaagcgtatgaatgctatacgcctgatctgattggtcacgggacaagagcaaatgaacagtcattttccatgcgagaaagcgctcttgaagtcatctcgtggttcaagcagcatgcgcacggccgtaaagtgatactcattggattctctctaggtgcacaggttgccgttgaagtgttatcgaatgagcctgatatcgtagacatagccgtcatcaacagcgctcttgtgatgccgctgccatggctttacttgatggtgagacctcttctccctcttacgtatccattattaaagaaagattggtttatccagctccaagctgaaaagatggggcttccaaacgatgtactgaatgactatgcggcggattcgaagagtttgcagaagaaaacccttctgacgatgtttcaagaaaatctccattacaagctcccagacacgtttcaacaagcgaaggcacggattcttgtcacagtgggagaaaaggaaaaaggtatcatgaaacggtcagcaaagaaaataacgacatcacatccgaaggcagcaggtgtcgtcgttcctgatattggacatacatttacgtttgaaaagaaagaactgtttattgatatgattcaatcctttatagaagagcgtgcgttaccagtggaattaaaggaaatcaagtagccgaaagtgaagacaggcataaaagaggcagttagatcttagaacctatatgatataggcataaaacgcttacagatgagctgcagtctgactgaaagctcatgagccgtagaaggaggagctatgagtaaaaactatatcatattcggtgcgagtcaaggcttaggggatgcttttgtaaaaggtcttccttcaagtggagatacagtttggattgtgtctcgaagtgaaccgagcagtttgaacatagatgacggtgtacatagaatttggctgaaaattgatttatcaagccaaacccacatccctattatgctcgaagcattggagaataaaaccattgatgttctcatctataacattggtttatgggaaaaacgaggctttgaagatgattattcattcgatcacgatcagccagaggatatcgctcatttaatcaatgtgaatgtcacctctacgattacttacatccaagcactgcttccgcacgtaaggaaatcggagaatggaaaaatcatcgtgattggctcaacggcgggactagatcatacaaacctgccgcaggtttcttttgtcgcttctaaatttggcctgcgcggaattgtgaatgcactgagagaacatgtgagaaaagataaaatatccgtcacctgtatcaatccaggagagctggcggcagaggttccatatgaagatggagccgaaaaagccatcactctatatggtgaaacgagaatccctgtacaggatattgtagagcttgcgagatgtgtgattcatttatcaagggtatcctgtgtaaaagaaatcaacgtcccagccatgacagatttgaatgcataatataaagcagaccacccgtttaaagaaaaaacgggtggttttttgattttatgatgaatgctgctgaagggtttgatagacagcttccgtcaagatctcaatgccggtaaagatagcagagcggtcgaatgtcatatatggatgatgtagaccgggctctagatcacagcctaaaccaagcatcgtggatttgatatgcggaacctttgctgcataaaagtgaaaatcctctccgcctgtcgtgacgatcgggggatcgagctgctctttgcctaaaatctgttcaattgcattagacatgatctggacagcttcctcatttaaggttgcggcaggcagacggtgatcggttgaaagtgtaatggaagcgccaaaggcatccgctacagcatgtacggctctttcaatttctttttctagttcatccatcacatcatttgtttgtgccctgacatctaatgtaaaagaagctttgccagggatgatgtttgaactgcccccgccagcatgtaggttggtcatttttacagaatgtgcaactcttgggtcgacatggatatgcgcgagtctctgcacgagggtagaagccacttcaatgacgttgaccccaagatgcgggcgtgcaccgtgggcttcctctccaataattgtgccgatgtaatgattactcgatccatgtaaaattgcaggtgcacagcgtccgtttaatgtttcttgaattgggcgcacatgcactccgtataagtaatcaacgtctgctaacatacctttttcaatcattttcagcgcgccgccgcctttttcctcagcaggctgaaaaatgaagcggatggtgccgttcgggagctccttttcctttaatgccatgaaggcgccgagagccattgtcatgtgtgcatcgtgaccacatgaatgattgggttgaaactcaccatctacttcctgccaaagtgcatcaatatcggctctcacagcgaccactggtgcgccttctccaatttcaccaatcactcctgtacagtcgtcaaatgttcgagtcttgcagcccattttttttaatatgccttcaagataagccgtcgtattcgtttcttcccagcttatttctgggtgggcgtgcaggtgttcaaagatgtctgtcacggtctgttgcatttcgtttgtcaaagttgtcatgagtagcctccttgctgacagaaaatctgccaaaacattcttttagtgaaataatattgatcttaaatatcatcagtgtttataatataacacatcatttgattattctgaaaattaagtgaaattccgatcgggacaaaggggttttgacacatgaaaacagcggcagtatcagcaccagagaaacaaaaacgaaaacttcaaatgccggatgcgtatgttctcttatttatcattgcgctcatttgtaccattgcaacgtattttgtaccagcgggtgagtttgaccgaaagacatcaggggaaatcacaacagctgttcctggcagctatcaccgcattgatcaatcacccgtaagtcccgttggcttttttacagccattcaggaagggatggtagggtcctcttctattatttttctcattctatttactggcggaaccattgccattttggagaaaacaggtgccattaacggaatgattcaccatgtcatcagcaggtttcaaacgaagcaattattgtttatttgtattgttggaggattattttcggtgcttggaacgaccggcattgtcgtgaattctgttataggatttattccaatcgggattattgtggcaaggtccttgaaatgggacgctgtggcaggagcagcggtcatttacatcggctgttatgctggatttaacgcaaccattttgtctccatctccactaggtttatctcaaacgattgcagagctgccgatcttttctggcattggcctgcgtgtcattatttatctttgctttcttatatctagtattgtgtacatctatttatatacaagacgcctgaagaataaagaaaagggaagtcttcttggtgatcaatggtttcctgcgaaggggcttggcggatctgatgcagaatctgtggacaagcctgcatttaccggcagacataagctgattttagcggtgtgcggattgtctcttgggggcttcttatatggcgcgcttcagcttggctggaccgataaggaaatggcaggtgtgttcatttttatggccattgctgctggattgcttggcggattagcagccaatgatattgcgaaaacatttattgtcggctgtcaaagccttgtgtacggcgcactcattgtcggaatggcacgctgcatttctgtcattttagaaaacggtaagctgcttgatacagtggtcaatggcttggcgagtatgctgacaggatttagtccaattgctggtgcgattgggatgtatattgcgagtgcacttcttcactttttgatttcatcaggatcaggagaagcggttgtctttattccaattcttgcgccactggctgatttaatgggcatcacaagacaggtagctgttgaagcggttatgcttggcgaaggggtggtcaactgtatcaatccgacgtcaggtgtgttgatggctgtgcttgctgcaagtggtattccttatgtgaagtggctgcgttttatggtaccgcttgcgctcatttggtttgtcattggtcttgtctttatttgtatcggcgttatgatcaactggggaccttattaaacatgtataaagctgctgacaattgtttggcagcttttttcttgtggaaatatgcatggagacagcgctttgaaagcacaataagtgtgttcacaaattcgctacatattttttttgagcaacccccttgcaaaagtttgtgaagtgttgcacaataagaatgtgaaatacttcacatacgaaaaacaacctagttttactcaggaggatgagataaatgacaaacgaaaaagtaaacaaagtagcacttattggagcaggttttgtaggcagcagttatgcctttacattaataaatcaagcgatcacagatgaattggttgtcatcgatttaaatcaagataaagcaatgggtgacgtcatggatttgaaccacgggaaagcatttgctccgcatcctgtgaatacatggtatggagattatgaggattgtaaggatgcagacattgtatgtatctgtgctggtgcgaaccaaaagccaggtgaaacgagacttgaccttgttgaaaaaaatttaaatatatttaaaggcattgtagacaatgtgatgaaaagtggattcgatggtattttcttagtcgccacgaaccctgttgatattttgacatatgccacttggaaattcagtggcctgccaaaagagcgagtgattggcagtggaaccacacttgatactgcaagatttagatacatgctcagtgagtactttgaagcagcggcacacaatgtgcatgcgtacatcattggagagcatggggatacagagcttgctgtgtggagtcatgcgaatatcggaagtgtacccattacagaattaatgaagagaaatgatcaatacaaacaagaagatttagatgagatgatggaaaatgtccgccatgccgcttaccaaatcattgagaaaaaaggcgccacttactacggcgtagcgatgagtttggcccgcattacaagagcgatcctgcacaatgaaaacagtattttgaccgtcagcacttacttagatggagagtatggagcagaagatgtctacattggtgtacctgcccttgtgaatcgaaatggcgcaacagaagtgatggagcttgcacttaatgatacagaaaaagaacaattcgcacacagtgtgaatgtgttaaaagagattttggctcctcatttttaatcaaaagcaacctatctgagcagaaaaggatgaatcactatgtggcagcaaatatataatccgtttggtaatgagttcgtgagtgcattggtagcaatgctcccaattttgtttttcctacttgcattaactgtatttaagttaaaaggtgttttagccgcttgttttaccttaatcgtcagctttgtaacagctgttttcttctttcatatgccaattgaaaaggcattatctgctgtgctgctcggtatatctaatgggctgtggccgattggatatatcgtcatcatggcggtatggctctataaaattgctgtgaaatctggtaaattcgatgtcattcgttctagtattgcaggaatctctcaagatcaacgtcttcagctattattaattggttttagttttaatgcatttttagagggagccgctgggtttggtgtaccgattgcgatcagtgctgctctcttaacagagcttgggtttaaaccgctgaaagctgcgatgctctgcttaattgccaatgctgcgtctggcgcatttggtgctgtgggtatcccagtcattacaggggcgcaaatgggcaatatgacgccgcttgcgttatctcaaacccttgtgtatacgattccgtttatttcattctgtattccgttcctgctcattctcattgtggacggattcaaagggattaaagaaacgctccctgccttgcttgttgtaagtggaagttatgccattttacaagctgtcacaatggtgacaatgggtcctgagcttgccaatattatttcagccttagcaagtatgggcattttggctttatttcttcgaaaatggcagccgaaacacatttatcgtgaagaaggagcaccagccattgaacagaaacaaacgtatcgcggcattgaagtgctgaaagcatggtctccgttctatattttaaccgccgttattacggtatggagtctgccagcatttaaagcattgtttgctgcaggaggcccgctcaactggacgacgattttagtgaagatgccgtttttgcatcagcaaattgtgaaattaccaccaattgcacaaacagaaacacccattgatgcaatctttaaaattgatgtcatcagtgcaacgggtactgccattctgattgcggtgatgctgacagggttgtttagcagacatattacattaacagaaggcgctgcctgtttaaaagcatcagtgaaagagctttgggtacctgttcttaccatttgttttgtcatgggctttgccaacttggcgaacttcgctggactaagttcagccattgggcttgcacttgctaaaacaggcgatttgttcccgcttgtcagcccggtgcttggctggatcggggtgtttattacaggatctgtcgtgagtaacaacgctttattcggcaaccttcaagcggtcactgcttctcaaatcggctcacaggcaggtttgttaatcggggcaaatacaactggcggggtcatggcaaaattaatttctccacaatccatcgccatagctacagcagctgttggagaaacaggtaaagaatctgagctcttccaaaagaccgtgaagtacagcttcatcctgctcggcattgtgtgtatatggacattcattcttgctcaatttgtataggtttaaaaaaagactgagacagctctcagtcacagcgtgtagataaaccctcgcattctttgtcaggtctgtgctccggtgctcacgaatgtaaaattcgctccgctccggtgctcgcctttcctagactgcaaaggttttctatcacgctgaaagaaggaagacaaagggctaaaacaaagatcattttagccctttgtcaacaaaaaagactgagacagctctcagtcttttttgtttatgtcgattcccttgtcacaagccgggtaggcagatggatatgttcacgctgtaatggtttttggtcttgcaggatctcgattatttgctgcacagaccgctggccaagctctacgatcgggatgtcaattgtggtgattgttggagctgtcacctcgcaaatgtcttgattgtcatagccgatcaccgctagatccttagggatttgataaccgtatgaaatggcctgtttaatgagccctgctgcgacttgatcattacccgtgaaaatggcatcaggtgcattcttcatgtcatggatgacatccattaagcgaaaaccgtcttcaatggtgaaggcctccccaaaaagccaatcgtcatgcagcggcaagccgtgtgcagaaagtgcatcaagatagccctgtttcctttgtttttgtgcttcactgctttcagtatcaaagcaaaacccaatcgatcttcgccctgactgaatcaagtagtcaaccgctttataggcggcttcccgctcatcgtatccaataatcgggatgtctgctgtttgatgatattcgttcgccatgacaatagggccgttcgttaaaaatggctcgatcttttcccacggattttctaatgcccctaatatgaccccatctacttctcttttttttaataattgaagcccttcaagctctaacgattcctgataaaacgtctgaagcacgatggctttataaccttgatccagtacttcctttgatatgcctttaatcaattgtgcaaaaaaaggatggtccacagccgggacagacacagcaatggtttttgtctgatgtgaacgaagagtgcgagccgctgaactcggtgtatattccatttctttcatcacctgtaaaatgagctgacgcttttcctctgacacatatggatgatgattcagcactctggaaacggtggtggttgaaaccccgcagcgtttggcaatttcataaattgtacacatattaacaaatcctttacacaaagttattgttctgaaatcgataacatcatttacaatgtgaaacaagttaaatattaacaaatggaattgattaattggagggaatggaatgcaaatattgacgaagatatcaggtaaaagcaaggattatcttcctttgctggatatgatcaatcaaggtgttcaagtaaagtctgattcagttgagaagcacctagcaaatgaaaagctggtgacgttccttgagcaagatatagggcgcacaggcttggaaaaaattctcttccattataaacaaaataaggaaaaaaagataccgtttctgccagttgataaactgatttcagaggatgagatcgatgatatcatgcaggtgttgaaagaagtattgagttctggccgttttacttcagggccatatattccggcgtttgaaaagcagctcgctgagtacttagggaagaaatatgtcattgccacgtcaagtggaacagatgccctaatgatcagcctcatatcagcaggcgtccatccgggagacgaggtcattttgccagcgaatagctttgctgcaacagaaaatgcagtgcttgcgattggggctgttccggtctatgccgatattgattcagatacttactgcttggcaccgagtgaaattgagaagcatatcacagatcaaacggcatgcattcttccggttcatttatatggaaagcaagcggatatgaaggccatttcggcgattgcgaaacagcatgggttgaaaatcattgaagatggctgtcaggcgatcggcagcagcggccttggtgcatatggagatggacttgttctcagctttaatccatacaaaaaccttggcgtctgcggtaaggcaggggctatcgccacaaatgatgaagccttagcggaaaaatgcatggagatcagctatcacggctttgaagtaggaaagaaaaatgtcaaacgcagtgactatggatttaattctaaaattgataatttgcaggcagcgatcggactcgaacgcatgaagtatttaggattacaaaactttaaacgcttttacttagcaaagcgatacattgaccagctgcaaacgcttgaggaagaaggatacttgaagcttccgaagctgacggatgatcatgtctggcatctgttcccgatcagagtgctaaagggcgaacgagatgagcttgcagcgaaattgctggaaatgggcatagaaacagatgtttattacccgattctatcgcatcagcatcaaacaaatcttgtttctcaaaagtataaacgtacgacacttccacacacggaaaaagcagcacagcaattacttcacttgccgctgtatccaggcatgccgctgcaagatcaggagaaggtcatcgagggggttcatcatgttatcaagtcttccattcaataaaaagctgctgaatcagccgaaaaatccgaagtggatcgtcttctgtgactttgatgaaacctattattctcacggaatgaccaatgagcagagagaggatgtaaagcggctggaagcctttgtggcagaaaagagcgaagcaggacagctcatgcttggctgggtcacgggaagcagcctcgattctgtcacaagtaaaatggaaaaaggaggttttcatcaattcccgcatttcattgcgtcgaacttaggaactgaaattgtgtatacatcggaagcccgttttggacagccagatgcggaatggatgaagcggctggatgcgcagggcttttcagatgaaaaaattgaagacatcctggaaaccgtacgtgaaaagggaattcatctcagaccgcaaacgcagctgggcagctcagggtataagaagaatttctattatcaggagcaggatgaacggacagatcttcatcatctatcattcatccaaacacttgccaaagagcgcggggtggcggtcaacattaacaaatgcaatccgctcgcaggagaccctgcggattgctatgatgtcgattttttaccagtcggcacagggaaggatgaaattgtccgctttatgctgaaccaatatgatctatcaaaagatcaaggctttgcctttggagatagtgggaacgatttgcggatgcttcaatccgtcacgcatggtttcctcgtccaaaatgcgacggccgaagccaagcggcaccatcatcagatttgtcatcatgggtatgcaaaaggaatctatgaaacactgaaaacagtgatgtataaacatgaggaggcacattcatgaagaaaattggaattgttggagcagggaatattgcaaaagctcatgcaagagcattatcaacaatcaaaggtgcagagttatccggtgtctatgatttgcacgagtcagttgcacagggattcattaaacagtacggcggacgtgtgtattcaagtatcgaaacactagcagatgcatctgatgggttgatcattgcctcccctaatttttgtcacaaagaccatgcccttcaggcactaagagcaggacagcccattttatgtgaaaagccgatggctgtgtcgctgaaggaagcgaaggaaatggtggagacagccaaacagttccaggttcaagccagtatgggctttaactatcgttacttatcctttgtgaatattttgaagaacttgattgccaatggtgaattaggccgcattttgaccgtcaggactcattttaagaaaaacagtgccctcagaagaaagacattttcatggagagacggcggtgagagtctgcgcacgagcggtgcattaggggatcttggtattcatttaattgatatgctgtggtacttatttggcagtgacatgaagaaagaatcacttaataccaagatgctgacacatgtaaaggaaaaagaagagaaaaaggtgcaggtggatgatcatacagaaattttcggtcagatggagaatcaagtattctttcacttggtcacatccaaaagcacgcagcctgaggaatgcggatttagtgtagaagtcgttggtcatgacaaggtattcaaataccatacgaacatgaaaaacgaatatgagatcagtgatggattgtgcgtggagcgtcatcaaatgccgcaaaccctgctgacagatccgccaaatgaattttacggatggtctgatacgttccgtgatcagctgatgcactgggtgaatactgatccatatccatgtcatatgaaagtggctgattttgtagatgggtatcgcgcacaggctgcgctcaatacatgcttcgagagggaagaggctgtcaagtctgcccgggcatattaaagaggtggagcggaggatgtcatgactccgctcctttttagaggaagtgaaaagatgaaaaaagtattttattttggctgtgtcttttatttttttattgggaccattcatgtgttttttggcagcttaactccttatttactgtcaagttacgataagggtcccggggaattatcttctttaatcttttttcagtttattggttttttgacaggtgttctgttatcccccattcttgtgaggaaaaaaggctatggcgctgttctgaccatgggtcttttgctgatgatcgggtcacttctccttgggcttttggtgccgggctggacaacacttgtgctggcaggtttttttcttgggagcggtgcaggcagtcttgagaccacagccggagcgtatgtgatttcgatggcaaacagtgcgaagcgaatcagcatcatggaggtcttttttgggttaggagcgctgttatttccacttgtgattctgctcactgtcactgaacagacgtggcactatgtgtttttatttcaagtcggtgcactgactttctttcttatgctctggcttgcctttatgaacaaattgcctcgtggacagatggattcttcttccaattccaatgggatgagaaaaccgtccttacttgttgatcgaaacaatcgaatgattgtggtgctcatgatctgttttgcttttttctacgcagggattgaaacgaactttgcgaactttttgccgtcgatcatgctagaaaaagggggagacaactggagtctttttgcggtttctaccttttggacagcgatcgtcattggcagaactgtcattgcgagaaaagctgatcagctgcatccgctgcgttttttaaagctaagcgcagcactcatgattctgctgctcgttgtatttgccctgacaacccacatcgccgcgcagctgcttctcatctttttcatcggcctgtgcgcagctggcatgttcccaatcgcactgactgcatctgcattaatgattgaaaatgccatcgacgaggcaacgagttactttattgcagccgcaagtttaggcggagcctgcttgtccttcttgattggctttagtcttgaatgggcaggagcagcaagtgccgtctttgttttcgccttcttagctgttcttctgtttgcagctgcgattcaaatgaatcgtgctaagaaaaaggatacggttctgtcgcagcaatcggcgctgaaagccgatcggtaagcaatatccaatgtctccttgagtccacctgaaaagatacaaaggacttgtactaaaacacagaacgtttgaataatatgtacaagtcagcatcaaaaggaggacgtctatgtggcggtgttttttggttatatctttttagggttgtcactttcagcgcctgttgggccagtcaatgcagcccaaatcgacagagggattaaaagtggattttggcacgcgtggatttttggtgtgggggcgatggccgcggatattgtctatatgctcctcatctattttggtgtcgcccagcttttgactgcacctctagtgaaaacctttttgtggctgttcggcttttttgttctgacctatacgggcattgaaagtctgcgtaaaatcaatttgcaggagagcccgaaaaaggatggtggaaacacttcggttggtcagtcgttcatgacggggtttttcatttctctttccaatccgctcagtattttattttggcttggcatctacggcagtattttggctaatacgattgaaaagtatggggcatctcaaatgctgatgtacagcatggctatttttatcggcatgctgatctgggatttcagtatggcgcttcttgctagttcgtttaggcgctatttaagtgaacgtgtcttacatggcttatccgttcttgcaggcttatctttacttggtttcggcgcctattttgggtatcaagggatcatggcgttgattgggtagaaaaacagactgatacattcagtctgtttttttgtaaggattgacagacataacacattcttgaataatggtgggatattgccatccgtatttttcttccagtattcaactatgtgtgcatgctgatcttatcagttatcacagcaacattgtctatctatttagcttttgctcagccctcatttattgggtgcttgattctgtctttttgatgaagaacagatcataggaatgatacaaaagcgctctattaaaagaagcagtttgacggctgcatacacttgtctgttcatgcatcatggagtgaaagacacacatacatgctcaatttgaacgagaatatccacctcttgcgtgcgcaaggaaagtcgttgaaggacagtcaccacagcctttttttctcataggctatggagaagacgctaaaacgaggtggaagaaatggcccagttgtatgcaaaaagttgccttgatcaaaatctacgatcactagaagaatggaagcaggatgcttttactcaatttggagagatggtaggagatgaggcagatacattcccttgtgtaccgggaagacaggggttttttctcgatcatttacgctatgggtttgttggtgatccgaggaaagaggaagcggttgatgaattagcccagctgctgagagaatatcaaagctgtgcgaaagaaacgggtcaatatgcttcatttatttgtttttttgaaacaccgcaggatttaaaagaaagttcacttgaacagtttgagcagcagttttggtcactgcttcaacgactgcaccagaaagatgaagtgccatggcctgaggatattccactagatactcatcatcatgagtgggagtattgctttcacggggaagcgtattttattttatgctccacaccggctcataagctcagaaaaagccgccacttcccttatgtcttgatggcatttcagcctagatgggtgtttgagaaattgaatggatcgaccaagtttggtcaaaaaatgagccagctcgttcgcaagcggctcaaagcgtatgatgaggtcagcgttcacccatcattaaaatggtacggtgatccgaccaatcatgaatggaagcaatactttctcccagatgaagaggcggagaaaccagcctccgccaaatgtccttttactgcattaaaaaacatgatgaaattatgatgcggtctgatcctgctgcttccacttttttctcataaatagcaccatgatggcaatcactgcaatgatcccaaggctgataaaaaagccaggtcgtccgcttgcctctgttaaagtgcctgaaatggcggctccaatcaagagaagcgcaagaatcatttcgcacgtttggcgagtggatggctttgatagctttttacttgagaacagaatgaatacccatgtgtacagaagggtaaggccggctgctgttgtgagatgctcgtagatgtgtttagacaaaaagagcgcaagcaaaatcgagacaattaagccagcagcagttaagataatcgaaggccatccgacatgagttgggtctttttgtttaaaacaagcaggtgcatcttgatgctccgacattgagccaagcagtgtcgtgaccgcataaagagaggcaaccaatgtcgaaaagccggcaataatgaagatgccattaaagatatgaagaaagatcgataaatgaaacggctccaatgatgtaataaatggactgctgttcttgtcaaaggctgttactgggacaagcaagagagcaagtccaattgagacgatatagatgaccgctagaatgatcagcatgacgcgtccagactttgccgcatccttcgggtcctttaaatgaaccgccatcagccccatgacttcaattcccccaaatgcataaaacgcgtaaatcaatccattccaaagaccaagcggaccgaggggcatccattcgtgatctttgtttggcagatgcggggtcggtttatgatctgtcagaatgccgaataacacaagcacagcaaggatcataaatagaaaaatcgccgctgtcttcagtactgcaaggacattttctgtcttttgaaaagaagaaagccctatgataatcacgagcagggcaagagcggaataaatcgcagaaaacacccagagcggaacagatggaaaccagtggcgggtaaaaagagaaatcgctgttaactgacttcccgtaatcaacatttctgcaaaccaatacacccagccattgctaaaccctgcccagcgtccatatgctttacgagcataggaacaaaatgaccctttatcagggttatcggctgtcatcgcagccaaatgtttaaagacgagataggttccgaccgcagcaagcaaaaaagaaatgcagacggaaaaaccggactttgtaatggcaatgctggaaccaaggaagaaaccagtgccaattgtacagccgactccgatgagagaaagctgccaccaagataaagtttgttcttctttcaaagcatgtgcaacacctttcgatttcaatgacattagcttgtgaccgccgtctttttttatacatgatcaaggggacgttttgggcatactgacatggaaaggagtgcatgtgatgaacggagaatatgtcattttaccaaaggatggacacggctttcgcttaggaaaaggccaatgtatgcgggtcgttgatattgaaggtcagcaagtagcagatgtcatggcctatcatgaaaaggatttttatgaaaaatttgaccaaggcgcgacaatggacagcctattttcgtcaaaagtgaaaaaaggggataagctctattctaatttatataaaccgatgtttacggtcattgaagacacagtcgaatgccatgatttatacatgcccgcctgccggcaagaaatgtatcagcttttatacggacggacgcatttagaggtcatgcatacatgctacgataatttgcggactgcctttgagccatttgggattcctaaggaggatatgtactatccttttaatgcctttatgaatacagtcattgatgaaaaaggaaaactgtctgtggagctcccaaaatctcttcccggtgattacattcgtctgcgagccgaaatggatctcattgtggccgtatccgcatgtccttctgatattgggaattgtaatggcgcaagctgtacatctatacgggtagaaattgattgaaaaagaaaagggccagtccatatagacatggtctttttcttttgtgaatgtttgatcattaatgaaataggggaacgtctaacaaaatgttcttcctgaaaacatggtataatgaagacttaaaaaacgttgtcaaaccaatgaattcagagtaaaacctgttctcttcatgtagaggatgcttaggaggaaaagtgtatgagtttgcagaaaaagatcagccaagagttgcatgtgcagccctcaattgacccaaagcaagagatcgaaaagcgggttggatttctaaaggaatacttgaaaaaaactggcgcaaaaggattcgtcctcggcattagcggcggacaggattcaacgctcgctggccgtcttgcacagctggctgcatctgagctgcgtcaagaaggaaaagaagaggcagtctttattgcggtgcgcctcccgcacggtgtgcagcaggatgaagatgatgcacagctcgctttatcatttattcagccggacaagtcgtggaaatatgatattgcgcctgccgtgacggcatttagtgaacaatatcaaaaggacacaggcggcccgttgtctgactttaataaaggaaatgtcaaagcacgtatgagaatgatcgcgcagtatgctgtcggaggagaagaaggattgcttgtcatcggtacagatcatgcagctgaagcagtaaccggcttcttcacgaagtatggcgatggcggtgcagatgttcttccgctcacaggtctgacgaaacgccaaggccggatgctgctagaagcgctgcaagcacctgagcgcctatacttaaagaaaccgacagcggatctgcttgatgacaaacctcagcaaacggatgaaacagaacttggcattacgtacaatgaaattgatgattacttagaaggtaagccagtgtcagatcaagcagcagaagcgattgaaaagcgctatgttcaatcagagcataaacgccaagtaccagcttccatgtttgatgactggtggaaataagaaaatgcaagagacctctcctgtgatggagaggttttttatagtaaaaatactgtttggaaaatataaaattatttataatggtctcttattgaatatgtatttaggatgataatcagcaactttaaccagcagatattgcttaatcatttaagaaataaaacaaacctatattatttactagaaaaatgaaattgattgtatttttatttgaataataaaaattttctaaaaatttagttgacaatctccgttatgtcattttatgattgtttacgtaaacgcttaccgtaaacgtttactataatcgaaaggggaggaatttgttgatgaaaaataaagaaaaatggagcggtgtattcccggctgtcttaattccttttaaagatgactattcaattgatgaacctgcttttcgtaagcttgtccgttgggtggcggagcacaaagggattaacggtatcgttgtcaatggacatactggcgagattatgactttactgccacatgaacgagctgaggctgtgcgcattgcagccgacgaattaaaaggggaagtacctgtcatttctggggtttctgctgaagggacaattgaagcgatccaacatgcaaaagccgttgaagaagctggcggagaaggtatacttctcatgccgccacattcatggctaagattcggtatgcagcctgagtcacctgtccaattctttaaagaagttgcagaagcgattgacatttcaatcatcgtacatcaatatccaacttggacaaaaacctcatatacaaccaatcaattactagaaatgtcggaaattgagaatgttgtctcgtttaaaattggtcaaagagacatggcacaatacgaggtcgatgtgcgggcattgaaaaaacatgcaccagatgtatcgttactcacatgtcacgatgaatatttattgccaacattaattcaagggattgatggagcacttgtaggtttcggctgttttgtgccagatttgatcgctgaacttgtgaaatgtgtggaagaaaaagatcttgtagcggccaataaagtttacgatagaatcttcgaattaaagcatgctgtgtataaaatggatgaaccttcatctacctctcatctgcgaatgaaggaagcgatgtaccagcgaggtctaatcagtagttcgcttgctaggaagccggtcttacctttaactcataaggagaaagaagagattcgccagggccttcaaagtgttggtttgcttaaggaaaacgtcagtagataacagaccattaatttcatgatgaaggtgagtcaggttataatagaggacaaaacaacagactcccggaggtatgaaatgtgtcagtaagtattaaagatgtagcattgaaagctggagtgtctatagcatctgtttcccgagtattaagtggtaaaccaggagtaggtgctcaaacggctgaaagaatcaaacaagtaattgatgaattaggctatcgtcctaatttaggagctagagggctcgtcaaaaggaagactgggaatatagctgtagtggttccgcgtggttcatatattttgaataatccatttttttcaacgattctagatggaatagcgaaggaattagatgagacggaattcaatatgttgatgtcgtttacatctgtacaacagcagcgattacttgaaacgcaggcagtagatggagccattctattttcaccaagaaatgaagaactaagcatggattggttaaaaagtttagccattcccattatagttgtcggaagttatctagaggattctccatttccatgtgtcaggccagatgatgaagaaggtgtgtgtcaatcaataacggccttatttgataaaggtcatcgaaccattgggctggtcaatggtccaatgagttcgatgcatagtgtgaggtattacaagggatatgagcgcacacttaaaaatttagggttaacaataaacaaagaacttgtgtttgagttagatgaatttgatgggggaaaagtagtagaagtggtttctcaatttctccaaggaaaccagcacatgactggagttgtttgctcttcagattttttggcgatgggggtcatgaaagcggcaaataacgcaaatgtgtcaatacctcatgatttgtctgtcgttggtgccgatgatgtgcccattgcaagttttctaaccccttctttatcttcagttcatgttgatttagttggaatgggaagaaaagctgtttctttactaacacagttattggaaggagaacagttagatgcgatggaacatatcttccctatgtactatatagaccggggcaccacgggaacgccaaaaaagaaatgatagatgctgaaaactcgtatgaacgctttagaatgtctcttggtttaaaatgtaagcgatttctttagcgctctttggcatgtacttttgcatcatttcctctaataaggaggagataacatgacgttagaattcagcggaaattcaaattctcatgatggagaagttgttgatagagcttcacaattattgactaggatggaaagtgtacctttttctagatggcatttaaaacctcgtatcattatgggatctgctactttttttgatgcttttgatgctctatctttagcgtttgttctcccagttctcatcggaatgtggagtttatcacctgctcaaattggtcttcttattgggtctggttatataggacaagcgattggtgctattttctttggctggttagcagaaaggcgcggccgtgtatttagtgcaaagtggactgtactcctcatgtccgtcatgagtattgcatgcgtgttttcaggtaattttatggccctgtttatttttcgttttatacaagggattggggtaggaggagaggtgccggtagcagcctcatatatcaatgagctgtcccgggctcaagggagaggcagattttttatgctttatgagatgatttttcctttaggattaatgatctcagctcaaataggcgcatttgttgtacctagctttgggtggaagtggatgtttttgattgggggcattggaggtttaatcgtctttgtattctttttcatgttgcgcgaatctccaaggtggcttatttcgaaaggcaggttagatgaagccgaaagaattattgaagaaattgaagctagtactgacaaacgaatgcctgtagcaaagcaagtatctagcagtactgaaaaaggcgactggaaagagcttttttcaactttttatcgtaaaagaacattgatcgtatggggactatggttttctgcctactttgtttcgaatggtttaaataactggttaccgagtctttataatactgtttacaatttgccagttggagattcattaagggcagcatctctaacaaatattttacagaccataggggtattcgcttgtgcatttttaattgataaagtaggacgaaagcgctgggcaaccattgcatttattgtaacaggtgctttattaacggctttatggatcagcggagctaattctccagaaagtgttatatatttagggtccgctgcttacggaatgatggggacaattacagttcttctctatctatatacacctgaaatttatccaacacgtatgagggtgattggaacggcatttgctacagcgtggcttaggctggcctcagcgatcgctcctattatgataggctttattttagaggtaagcggtgtttcaactatttttattcttttcgcaagtgtgactgtagtgggagcaattcttgcttttaaaatgatcgaaacgcgcgagaaagtattagaggatattgcaccgtgagttacgcacgcagtgaagaacttattccaaagagggtaggttcttttttctatgcagatgatctacgtacaatttttcaaattgcctatcttttcgcgcgccatttatcatataatagatacattatgtagcattccttgtcgtaaggaggacgtgtcacgaatatgaaaaacaatagagaaatccctgtgagacagcgaaatattgtcctcattggctttatgggtgttgggaaaacaaccattgggcagctggttgccaaaaagctatatagagattttattgatgtggatcaggagattgagaaaaagtataacatgacgattcctgagatctttcagcaaaaaggagaagcattcttcaggcaggctgaaaaagattatatcgtcgatttatgtgaacatacgcagctaaagatcgtttctcttggaggcggtgcattcaaacaggaagaaatcaaacgcgcctgcttgaagcattgtacggttcttttccttgatttatcctgggagaattggaaacagcggctggatattttaattgaaaaccgccctgttcttcacaaccggacgctcgatgagatgaaagagctgtttgaagagcgccgggaaatatatgcccttcataactcaagagtcgaaacagatcatctagaagctgaggaagtcgccaattatattgtggacacactcaagcttggctgggatttatactcgaaataaaaaagtctaccaacgagggtagactttttctataagttcaattcttcattccttgaatgagtgcagcttttaaacagaaggaaataggctgctgctgtgcatcgaattgaagttgaaacagctgctttgtatcagggtctgcggattgaagatgggaaacgatctctttttgaacattctctggtgtgcgtccacgcatcatccagtcctgataatcaatttgcagatcccagtaacgcttttctttttgagtcagttggttggcagcgaagagctctttccattctgataacgagctttctcgcacatgagaaggatctctgagtctatttaagtgattaatgaatgaatcctgtgcagtgttttcgggtgcgtaatgatcgacgagcaggaatgtgccgcctttttttaagacacggctgatttcagacatagctgccggcaggtttggaaagtggtgagcggcaaagcggcacgtcacgatgtcaaatgattcatcagcgaagggcagtgcttctgcggctgcccgctcaaaagtaatatgtttcagttggcgttcttccgcaagtgctgctgcaacctcgatcattttttgcgtgacatcaatgccgattcctttagaaatgatatctgaaaaggaaaaaacggtatgtcctgccccgcagccgatatcaagtaaatgctcgtgacccttcgtattggctgttgctttcatccattccagctcttctccggctgcaaatataggtgaatctcgatagttctcggcattttgtgagaattggttttcggctttagcatatggattcatttcttctccccctttgttgtctctttatcgtaaaattcattttgttatttgtctaagacataaaagatatgacatgaatagttaaaacctatgaggtgatgaaagtggatatacgaatgatggaatatgtcatggaagtgtaccggcagaaaagttttacaaaagcagcggatcaacttcacattgcacagccttctttaagccaacaaatgaagaagctggaagaggaattagacacacccctctttattcgaaagtatggacaagtcacgcccacacctcaagggagtcgattcattaaaagggctgagaacattttgaaggaaagagatgatttgctgcgtgaaatgggagaagcagcttatgaggtggggaaagagctgaacattggagcgccagcagtcacagggggctatgtcttgcccggtttattaaaaaccttttgtcgaacgtatcctcatgttcacgttcaactaatagaagaatcacctcgtgagctagaaaaacttctattggctggaaagctggatttggctattttatctatgcctgtcgagcatgaatcattgaaaacgaaacacatgctgacagagccgcttcttctcgcagttccgcaaactgcccagccctggtcaacagatgaattgaacgaaatcatcaatcaagcagatcagaaagggtctgttccgtttcgccttctggaagacgccgcatttattatgctgaaagagggatatggctttcggcaagtggtcatggaactatgtcttcatcatggttttcagccgaagattacctttgaaacaagtcatattcaaacagcgcaggcattggtcaaaaatggactaggtgtgacagttgtgccgaaaatggtggcacaagaggaaaggaacgaagtcacttatttgaaaattgattcatgcccaacccgcactcttgtgtttgcatatgtggaagaaaggtatttaacgaaagccgctcaagccctaatggacctttaccagaatcaagcttaaacaaacgtttaattaaatgcaaaaagcaggggagcaccctgctttctaatagatatccagacgctgatccgtcatcacaggaatttgctgtctcacttcatccactagctgaagatcaatttccgcataataaatgtcttcctcatggcttgtttcaagcagaatacggccaagtggatcaatcaccatggagtggccagggaattcagtgtctctgcttgtgcctgttctgttaacagcaatcataaatgactggttctcaatcgctcttgcgatgagcaggcaacgccaatgatccactcttgctgacggccattgcgccgtattgatgagcactttcgcccctttgtttacaagtgttctggaaagctgcggaaagcgaaggtcgtagcagatcatcgcaccgatcttcacatcctcatcatagtcaaataaaccaagctgatcaccagctgttaaatagttgtgctcatccattaagcggaataagtgaattttatcataatccactaagagctcaccttggcggttaaagacatacatcgtgttggtgatgttgtcatcttctgtgcgcttgttcaatacacttcctgcgatgagaaccacttggtgtttgcgggcaaaggaagagaagagctgttttgtgcgttcaccgtttacatctgcaagctgctcggcttgttcaagatcgtaaccggtattccacatttcgggtaaaatgatcagatcaggctgctgatggatggcttcttctaaaaacgcttctgctttttgaaagttcacattaggttctccaatttgtacgtccatttggacaagggcgattttcatacaggttcctcctttatgcgatggtgtaaatgtgaaaatccatgaatgtctatcaatttgttttgcctgagaacatctattcttcaagccagtttctttatcataaaggtttcaatcctctttgccaatagaaatgtcagaaggttttgtcttttgtagtgaaaatgactttctaagtcaagaaaacagtgatatgatactcataactaataaaacaaaggggaatagtatggtatgcaattgttcgatttaccactagaagagctaaaagtatataaaccgaagaaaacagcacgacctgatttctcagacttttggaaggcgtcgctcgaagaactgcgccaagtggaggcagagccagcacttgaaccttatgattatccagtgaaaggcgtcaaggtgtaccgcctgacgtatcaaagctttggtcattctcgaattgaaggctggtatgcggtaccagatcaaacaggtccgcatccagcgctcgttcgttttcatggctataatgccagctatgacggcggcattcacgacatcgtcaactgggcactgcatggctatgcgacatttggtatgctcgtccgcggtcaagggggcagtgaagataagacagtgactccaggcgggcaggctttgggatggatgacaaaaggcattttatcgaaagagacctactattatcgaggtgtttatttagatgcggttcgtgcactcgacgttattcagtcctttccggaagtggatgaacaccgtatcggcgtggtgggtggaagccagggaggtgcactggcggttgcagctgcggcactttcagacattccaaaggtcgtcgtggcagattatccttacttatcaaatttcgagcgtgcagtggatgtggcattggagcagccttatttagaaatcaattcatactttcgaagaaacagtgatccagaagcggaagaaaaggtatttgagacattgagctactttgatttgatcaatttagccgaatgggtgaaacagcccacattgatggccatcggtctgatcgaccaaatcaccccgccatctactgtgtttgcggtatacaaccatttagaaacagataaagatttaaaggtgtatcgctactttggacacgagtacatcccggcttttcaaacagagaagcttgccttcttacaaaagcatttaaagatctaaaagaaaagaggccgctctaggagggcctcttttttaatagctcgtattctgtctcgttttttcatcaggcactaacgcagtgataatcagggcaagggcagtgatgatatgaagaatgaatccgagaattggaatccaagcaaggcaggatgtgacaattccgatgatgcttccaatcattggtccctggtctcgcttcgataagacgagtgtgataatatgcagaataagcatgaccatgagcggtgaatagccattgctgataacgaatagacctccgatcacagggatggcaaggcaggcttcaaaaatcccggtgatccatttcataatgcgagatatagacatcagatccaactccttttttatatgtcttattcgtattttcccaaaacgtgaagaagtcatgcagaattctatagaaagagttgatggatgttgagagagagagtcaaggaagagctgaaaatcatcgaagaaacgtatgacgtaaagatttgcctcgccgttgaatcaggcagcagggcatggggatttccctcgactgatagtgattatgatgttcgttttttatatgttccccggaaagaatggtattgggcgatggaagagcatcgtgatgtcattgaacggccgattgatgacgtgcttgatatcagcggctgggagcttagaaaggcacttcgcttattcaataaatcaaatccatccatcatggaatggctatcttctgacatcatctatgctgaatctttctctttagcaaagcagctaagagaattaaaggatcgagcgttttatcctgcagcattgatgtatcattacctcaatatggcgaagcggaatgaaagccggcatttacgaggggagcaggtgcgaatcaagaagtatttctatgtgcttcgtccgctatttgcctgtcagtggattgaacgctaccggacggttccgccgatggactttcatgaactgctcgaggagctagtggaggaaggcccgcttttaacagaaattcacgagctgctcaaacgtaaaatggacggagaggaaatggatgtagagaaccgtctcgcctatgtccatccattcatcgacaaagagctggcgcgttttgatgaattggtgaaaagctacaatcagccgaaagacaatctcacgcaagaattaaatgagctgctgcagtctacccttgatgaggtgtgggcgtaggagggaagagccagccggatagcggcaggctcttttttaactcttattgtgataaaaccacaaaaaaagtcagaatttttgtcatcttcaaatattgtagcggacagcttatgagccttacaataaagacatagcttacaaagagtgggaggtgccctttatggagtcggtcacaagaaatttcttcttgtttttgtcaaagagcagtctcttgaaccatattgctcgtaattggggaagtgctgttgcatctaagaaaatcatcggtgggaaggattttgagagcgctatctctgtcatcaaacgattaaatgatcaagggatggctgtaacagttgatcaccttggtgagtttgtcacaaaggcagagattgcaaatgagcggacgaatgagtgtattcaaaccattcagcggattgctgaggcgggactcaattcccacgtgtcactcaaaatgacatcactcggcctggatattgacgatgaccttgtgtatcgcaatatgaaaagcattttagatacggcagagaaacaccgtatcatggtgacaatcgatatggaggatgaacagcgctgtcaaaaaacgctggacatttttaaagagatgaaatctcaatatgagtatgtcagtacggtcctgcaggcgtatttgtacagaacagaaaaggatcttgatgacctaaatgagcttcagccatttttaagacttgtaaagggtgcctataaggaatccgctgaagtggcgtatccaaacaaaaaagacgtcgatcagaattatcaaaagctgatcgaaaagcaattactcacagggaactatacagccattgcgacacatgacgatcaaatgatcgagtttacgaaaaatattgtgaaaaaacacaatataccgacaagtcagttcgaatttcaaatgctgtatggcatgaggtcagaaacgcagcaggcacttgtgaaagagggctatcaaatgagggtctataccccgtatggacgagagtggtatggctactacatgagacgtcttgcagaacggccggcaaacattgcctttgctttaaaagggatgacgagaaaataatttgaaacgggagcgtgacaaagatgacaacaccttacaaacatgaaccattcacggattttagccaggaagaaaaccgcaaagcgtttgaacaagcattagcaaaggtaacagaatcacttggtcaaacctatccgctcgtgattaatggagaaagaatcgaaacgaaagaccagattatctcgatcaatccagcgaaaaaggatgaagtcgttggaaccgtatcaaaggccgggaaagaagaggcagagcaagcggttcaagctgcggcgaaagcatttgaaacttggcgctatacgtctccagaagaaagagccagcgtcatattccgtgctgcggcaagcattcgccgtaaaaagcatgagtattcagcccttcttgtaaaagaagcaggtaagccttggaacgaagcggatgcagatacagcagaagcaatcgacttccttgaatactatgcccgtcaaatgctggagctggcgaaaggcaaaccagtgaacagccgcgaaggggaacgcaatcaatatgtttacacaccaactggcgtgacgctcgtcattccgccgtggaacttcttgtttgccattatggcaggaacaacagtagcaccaatcgttacagggaacacagttgtcttaaaaccagcgagtgcaactcctgtgattgcggcacgttttgtggaagagcttgagcaagcaggtcttccaaagggtgtggtgaactttgtaccaggaagcggagcagaggtcggagattacttagtcgatcatccgaaaacaagcctgattacattcactggctcaagagaagtagggacacgtatctttgaacgcgcggcaaaagtacagccaggtcagcagcatttaaagcgcgtcattgctgaaatgggcggtaaagatacagtggttgtagatgaggatgcagacgtcgaattagcggctaatgccattttcacatcagccttcggtttttcaggtcagaaatgttcggctggatctcgggctgtcgtccacgagaagctgtatgaccaagtggtcgagcgagtgaaggaaatcacagaaacaaaaacaacagcgaatcctctttctgcggatgtctacatgggacctgtcattgatcaagcgtcctttgacaagatcacggattatatcgaggtgggcaaggaggaaggccgtttagtgactggtggaacgagtgatgattcggaaggatacttcattcacccaaccatttttgcagatcttgagccaacatctcgcttgatgcaagaagaaatcttcggaccagtcttggccttctcgaaagtgtctagctttgatgaggcacttgaagtagccaacaacacggaatatggtttgacaggtgctgtcattaccaataatcgtgatcacatcaaccgtgcgaagcaggagttccatgtagggaatctctactttaaccgtaactgcacaggagccatcgtgggataccacccatttggcggattcaaaatgtcaggaaccgattcaaaagcaggcggtccagattacctagctctacacatgcaggcgaaaacgattagtgaaatgttttaagatggaaaagcatgaacctgtgcacacgggttcatgctttttttgcttgtctacgacttgtttctatacaaatctgtccggaaagaagtatgataaatgtattacttaatcagggagcaatcgggatggaagagatattagaaaagcttcatacattttttgatgtcgataagttaattgcatttattagcgggtatttaaaaaaaccagtcattttagaaagcacagagtgccagctccttgcttataattcttacagcattcagcagtttgacccagtcaaccagcaaacgattttctcaaaggaatgcccggggtctgtagtcgattggttaaagaaaacaggggtcatcgagcgacttcacacggattcaaagcctttttatgtgagcggtcatgacgagctcgggtttaatcggcgggtggctgtgagcgccaagcataaacaagaagttgtgggctttatttgggtgcaggacattgaggattccctctctcaggaggagctgcaatttttgcacgaagcttcctttcaagtgggaaaagtgatttataagaataagaaacagctggagaaaaaggaaggcaagattgaagaatttttcaaaaaggtcatggatgatcatttttatacagaagaagaactgaagtgggaggctgagaatttaagtatcccattgccggcagtatttactgtcatggtcgtacatgctgccgataacaaaagtgagacggcagaagacgtgaaggatgtcattcgaacgtatttgcagctagaagataaggtgaatcacgtatactccgttcaagccgacattgtcgtgatattgggcagcttgtcagaccggcactcaccgaaagcaactgctgccgacgtcatcgctcatctgcaatcgaaaacgcatgcccatccttcgccgctgtatatcgggatgggaagagagtatcgagatgtcatgaaaatgagtacaagtcgatttgaagcgatagaggtcgtgaaggctgtgaaaattgttgggggacaagagctgattccatatgattacgagaatctgggggttttccggttcttagactcgatttacagccatcaaaaaaagaaaaatgatttcaatccagatttgttacgtttgaaggaaaaagaccgtgacagccaaacttcttttttaaaaacgcttgaagtctacttattgaataactgcaagctaaagcctgctgcagagcagttgtttattcatcaaaatacattaaactatcgaatgaaacaaatctttgatatgacctcaatcgatttaagtcacttcagccagcgatgtgagttatttattgaattgatgctgatgaaaaaagatcaataatcatcgaatccgcaggtgcccgggatcacctgcgggttttcatgtgaaaatggcatacaactgctgcgttacgttgtatgatagataaggattttatgaaagggggaccacctttgggagcagtcaccttggccattttgatttttatcctgaccctcgtccttgtcatttggcagccaggacgtttaaccattggatggtcagcatgtggaggcgccattcttgcacttgtctttagtgtcgttcatctgggcgatgtgtgggaagtgacgcatatagtatggaacgcgacatttgcgtttattggcatcattattatttcgttaattttagatgaaattgggtttttcgaatgggctgcactgcatatggcaaaagccgcaaaagggaacggtgtccgcatgtttatttatttaacattgctcggcgctgtcgtggctgctttttttgcgaacgatggagcggcactgattctgaccccgatcgtcttgtctgtggtgagagcgttaaagctggatgaacggatgatcctgccttttgtgatggcgagcggctttattgcagatacaacctccttgccatttgtcattagtaacttggttaatatcgtatcagccgactattttcatattggatttctagaatatacagcaaacatgttcgtgccaaaccttgtgtcgcttggagcgagcatgctagtgctttatgtgttttaccggaagctcatcccaaaaacatacgatctgtcacaagcgaaagagccggcatcagctatccgagatatccgcatgttccgcttgtcttggtatgtgcttggctgtctgcttgtcggttattttgcaggggaactcattggggttccggtctccatcattgtgggcggtattgcccttgtctttttgtggctggcgagaagaagtccgcaagtggcgacaaaacgcgtcataaaagaagcaccgtggtccatagtctttttctcaattggcatgtatgtcgtcgtatatggactaaagaatgtcggtctcacagaaatattggcggcatggatcgaacaaggcgcatcgcatggcttgcttgcgggaacgatgtttatgggcgtgcttgccgcagtgctgtcctctgtcatgaacaatctgcccactgtgttaatcgatgcgattgcgatcggtcatacagatacagcaggcgtcatgagagacggactgatttatgccaatgtcatcggctccaaccttggtccgaaaatgacccctatcggctcattggcgacattgctgtggcttcatgttctcaagaaaaagggcgtccatatttcttggggtgcatacatgaaagccggaatcatcctgaccatcccaaccttgatccttactttactagggttatatgtgtggttatggctgatacattaaagctaaatacaaaagagagcagatccatgagatctgctctcctttattacagatatttcgcatagcgcttttctaaaaagtcttgaagcaatgagactacgctgcaaatgccccagtatatgagtgcgaccaaaatatacatggtcatataatcgaattcgcgtccacctacaatttttgcttgctggaagagctcgggtacagtaatcatcgcagccagtgaggaggctttgattaaatcgagcatgacattggttaaaggcggcagtgcgatgcggacagattgaggtaaaatgacaccgcgcatcgtttgccaatagctgagacctagtgacttggcagcttccacctgtccactcggaacagaggagagagccgcccgattgatttctgcaatataggcagcgctattgaagctgaacccaataatggcagcggtgaccgctgtaaactcaatcccgatataagggaatccaaaataaagaataaacaaaatcaccagaatgggcacgcctcgcatgaatgagatatacaaccgtgcaggcaggcgaagcatccacgtgttcgccattctggcaagcgcaataaaaaagccaagaattgtaccaaaaaacatgctcacaaaggaaatgagcagcgtcagccagatgcctttcatgacaaatggaaatgacgcctttgccagtgcaggattaaatatatattctaaatgaatatctcccacgattgcggctccttatttagaaatgtcgacatcttcgacatcagcatctattttctttgagacgtctgcatgatgaaagaatttttcggaaatctttttcatggttccgtcttttttcatgtcttttaagacacgatttaattctttttgaagctctgtgttgtctttcttcatcacaaaaccttgttcgtttggcatgtattttaagtcagggtgaatcgtaatatttagtttcgggaatgcagcaagagctagtgtctgcaagtaataatcatttagaatgacatctgtacgaccattagcgacatcctttaagtattgctcgtttgtcgcattatcataaatgacttccttcgcaccgtacttgcgagcgacatccatgtaaatcgttgtggcagctccagctgctttctttccttttaaatcttttaacgtcttaatgccagacaaatcatcttttcgtacgatcgccgtgccataggaatatttataaggagttgaaaaggcaaacttatcttttctgtcatctgtgatgtcaatgtcgtttgcagcggcatccacttgaccagaattaatggcgctcagcatgccatcatagcccatttctttaaattctactttcacatcaaggcgtttaaacgcttctttgaccacttccacttcataaccagtcaattgatccttgccattagatgtatcatgatatgacgttggataaagggtgcctgaagtagcaaccacgattttccctttcttttgaatctcatcccactttgaatctccagactgagaagagcttgattgactgcaagcagacatgacaagtatgaaagcagacacaacaagcatcaaccatatcgattttctatgataaaaacgactcatttaagaatcctcctctattttttatacaaaacaaaacatagcacgctttttctgttaggacaacgttttcagaagaaaagcgaaaaagtaagaatattatgtgcaatttgcgtggtgaaataatgtataaaaaaggaaagcgcgtacaaaataattgcgaataaaggagggaataacaatgatgaaaaaagtaagtggcttaatcatattatcgatgatgctgttgtctggtttttatatggaaacagctcatggtgaaacaccccaaatggaaaagcgtccagtaacgcatcaagtaaaattaacgacagaacaacaaaaacaaattgaaatgcttgagcagcaaattctttctaaacgaaaagaagtgattgagaaatacgttcaatatggtgtgttaacaaaggaacaaggtacacatattaccaaacgaatggatgagcattacaatcatttggaaaataacggatttgttccattgctgaaaaaaccacagcaccatcgaccataatgatgaaaccggcagcgaggtgccggttttttattatttatgaatcttttcagaaggtgagactttcaccatctttagggacaaaaatggcttgatctgcatgatgctcctgaatgtaagcttgtaaagaagctcttgttagcaagcaatggttcactgcctcaaggtgacaagcgacaatttgtgcttttggctgagaacggtgaacgtctaaaatgtcttcctttgtcatggtaatcggatcgccttctaaaaattgagcagctccgctattaaccacaatgacatctggcttgcatgtattgacaacctccttcggctcatcacaccaaatggtatcacctgcaatgtaaagggtaggttcatcagggtgagagaaaacaaaaccgctgacctgtcccatccgcttcgcagtttctcctgtcccatgctgtccacctgtccgcttaatatgaacaccgcaaatgtctatttcatcttcaatgcatgtgacatactggaaaccggcttcttcaacttcttttttgtcattctccgattgcgtataaatgggctggtcttgagctaatttttgttttgcctcgtcatcaaagtgatccacgtgcaaatgagtgagtaagacagcatctgggtgtaacatgttgtctaagtcaatgtttacaggcagatcaacaataggattgttcaaatgttgattggctgtatgaggaaacggtggatatgttccttttgctgctaaaaagggatcaatgaagaaagttgcctgaccatattgaaggtataaagtagcattccgaatgagcgtgattttcatgaaaaggcctcctttttttctgattaagtttacagtatattaaaagagttccatatgacagagggtaatgaaagtctttcagcagaaggacttgatttttgaaagaggtgagtcaatgttagaccaaaccgatatggatatattaaaagagctctctaaaaacagtcgattgaccatgaaagcgctaggtgaaaaagttcatttaaccggtcaagctgttgcaaatcgtgtgttaaagcttgaagaagagggtgtgattgaagcatataccatttcgattgactggcggactcaaaagaccatccaaacatttatgcagctctatacccgcagtcctcatcacgaaccacttctgtcgtttctcgaccaacaggaagagatcaagaacttgtttaaaataagtggtgagggctgttatatggctgaaggccatttttccagtcatgatgaactggatctgtttttaacggagctgacaaattacgcaaattataaactgtctattgcggttaaacgtctcattcatcagtaatagaagagacgcaggaggaaaaggaacgatgaaaaaattaatcaaaaatcaagctgaaccgatgacaaaggaaaggatcaaagcagacttggttcaacttggtgtgaaaaaaggcatgattttatgtgttcactcatctttatcatctatcggctgggtaaacggaggcgctgttgccctcatacaagcattgatggaaaccttatcagaagaggggacactgataatgccggcacaaacgttagagctttctgatcccgctgattggatcaatccgcctgttcctttttcgtggtggaaatcgatcaaagagacgatgcctgcatttgatccagcatacacgacgccaacagcaatggggaaggtagcggaaacgttttggaaatacccaggcgtggcgagaagcaatcatcctcatttttcattcacagcctggggcaaaaggaaacatgagcttctgaaacaccacgcactttcttttggattaggagaacattcgcctctagcccgcatgtatgatcttcaggctcaggtgctgctgattggtacgtcatttgagagcctgacagctttccatcttgctgaatatcgcatccctcagcaagacctcatgacaagaggagctcccatcttagaaaatggatggagggtatggaaagagtaccaagatattatcacaagagaagaactatttgagcagatcggtcgtgattttctacaatcaggaggcactcatgatcacggtcaaatcggacttgccagttcatatttattgccggtgagagaatcagtagactttgcggaaaagtggcttgatttgtacgatcagtcgtgatctacacagtttggaaatttatatgataaaggtcttgatcaggctgctgtgaggtatagcaggtgagctgatagtctccctttggaatagggaaagacagcacctgagccatgacgcttgtgatataaacttgatcgcttgcatgcgtaaaaggcactgtaactattctgtcagccgaggctgggggcatatcgctatttaaagttacggtaacagatgcttttccgttgttgaccccttcaaaggacacaccctgatctcccatggcgaatccttgaagaatgtcatcatctgaccaatcaatcacaggtggtgttttgcttccggtgtatatggtgatttggtgataagagataaatagggaataggcttggtttaacttattcatttaaaaaactcctttatacatagattttcgttggaatgtgaatggttgaaagaatgattcttgaagagaatgttaggcagcaagacgattgtcgccgtcttgcgcttctatttgaggaatctagatgtgaaattgcgaaaccattgcttttaaatctcctgctaaatgggcaagagcttctgatgatgctgttacttcttccattgaggcaaattgttcttctgttaaaccggctacttgctgtgaatgttcactcgttagtttaacgccttctgtgatagtggcaaaggattgtttcgcatcgtttgtataagctgcgattttttgtgatgcactagataaatgtttgatgccatctgccatttctctcattgactgttgaatatcaataaatgattcttctgtatgagaaataagtacagtcccttgagccgcttcctcttttactcgtttgatggcattcgtcgaatgagtcatctctttttggatttcagaaatgagatgggaaatcatgtttgatgatgcttgagattcttcagcgagctttctcacttcgtctgcgacaaccgcaaaaccttttccatgctcgcctgctcgtgctgcttcaattgctgcgttaagagcaagcaggtttgtctgattagcgatgtctgtaataacattggaaatatgatcaatttcagctgaacgtgtttctaatgcttgaacggctgtcccattttcctcgattgattttgcaatagatgtcatttgtgagtttacttccccaatattctgtacaccttttagggccatttcttgtgcaaattgacttcttgaagccatttgttccgcattttccgtgatgtttgccagctcgttagatacttgaatcatcgtgtgctcacttgttgtcatttgagctgattgttcttctgatgattgagctacttcttgaatactgtgggtgattttttctgatgctgcacttgtttcttctgcgctaactgaaagctgctcagatgaggtggccactaattcagatgtgttcatgacattaagaatggtttgatttaatttttcccgcatcttattgaaatgaccagccaggtcagacagttcatcgcctgccgtatccgacacattgatggttaaatttccttcgcctgcacttttaatggcagaagctatgcacttgaggcgtgactgaaaccgctttgtgaaaatagaaataatgataactgcaacaattaaacttaacaacagaacaatgacaaattgaatatagaatgactgaagcatttgtgaaatcatgctttgattggcgcccgtataaaaaataccaatcgttttgcctgcttcatttttgatcggcatataagccgtttgatagtctttcccggcaacatttgctgtgccgtaatagtcttctcctttatctaatacagctgtcttcacttcaggtgagacttctgtaccgacagctcgttttccgtttaacatgacattcgtcgcgacacgggtattcccttggaaaattgtgatggtatcatcggtatattcagctaattggtcaaccaatatatcatgatcattgatttgggtatcccctttataaagcttgccatcttttatctgccacgagcctgccactttttcatctaggtaggcatagcctagctttaaatcaccttttgctttttcagtggccatgcgcttgatgttttctgtcatttcacgattcaccacataaccaacaactgctgaaaagatgatgaggacacttaaaaagatcagcaaaattttggcaccaagcctcagttttccctttttcttcatgctttttgactcctttaggtataaggtaggttaaacctccttaaggattatcggcatgaaaaaaatgtttgaaatacctgtatgcagttacgagaaaatttttttagatagaaaaaggaaatggcgttaatcgatgataaattgtattcttgtgccgtcaggatcatccgataattgatgaccgacccatgagcctgctcccctattatctgaaggactgatatatttgacagaagctcctgttcctccttccttacacatcgccatcggccattcgtcccgatcatacccgcgctttgttgggatgccatgaagtgattggtctctctgttcatcgctatgtttacggtcaatcgtacatacggatgaatggccttcatcaattgcctcttctatgtgcttcgcggtttctgggtaacgatctgatgggaagtgaatggttttgtcataagatgaattcgtcgtctcttgtttactttgctccagctgaatatagcctgttgctacaccaacgacgattagtaaaagcaagagaatgattttaagaagtttcatagatgctagctctctttcttgtttgcgtattttgtaaacagaagtatagcagaattacttaccaatttctcctggttttgaaaaaacgccttttaaagttcgaaaaacggtttttttccgttttcttgcttttcatatttgtaaaaattcataaaaattttaattttgttggtcaaaaaaagattatggtttatcaaaacggctttatcactgctttttgggctaatttcaagaatttaacacacagaaatttttaaaaaataaaattgactagaccgatatgctttaataatatggagtcaaatatcaaaaaatgtcgtaatttatcaaaatatgattctatttacattgcaggaggggagtacaaatggcggatgtctcttatcggcttggtatagacataggaggaacatttactgatttatcgctgatgaatgaagcaacaggggcgctgactgaactcaaaacacccacagtgactgacgacccagcccagggaattatcaatgggctaaaacttctaaaagacaggggtgttgatttatctaaaatccaatatctcgtacacggaatgacaatcggtcttaatacattattgcagcggaaaggagcagatttagccctttttgtgacggaaggctttcaagacatattgtcactacaacgtttacggttacccattccttatgacttcaattctcgtttgccggaaccattgataccacgaaagcatgtatacccaatctctgaaaggttgatacacgatggtacgatcaaaaaacctctccatctgcagcaattagatcatgctgtccagcaggtcatgtctaaaaggctagcaggtattgtcatttcttttttacatagttatcaaaatccagttcatgaattacaggcaaaagcctatatcaaacaccattatccgcaattagaagttcttacttcatctgaattatggcctcaaatgagagaatacgagcgtactgtgatgtctgttgtcaatttgtacattcaaccaaaggtaaaacagtatttacaaacattgaaaagccgtttgaaggaagaaggtgtaccaatttctccatacattacacaatcaaatggtggtttaatggatgcagaaagtgcagcaacctcacctgttaaaacacttttttctggtccagcagctggtgtcattggtgcggcaagaatcgcagcctctgcaaacgaatccaacctgatcacttttgatgtaggggggacgagtgcagatatctccattattcaaaaggggcagcctacaatggctcagtctaatcagctttcaggttttcctatcattcttccatctgttgcgatgtattcaataggggcaggcggaggttctgtcgcgtggattgatcagggcgggcttctcaaagcaggaccagaatcagttggctcgcagccgggaccagcttcgtatggtaagggaaagaaagctgccttaactgatgcgttcctcatatgcggttatctcaatcaagagcgttttgccggaggacatttacaactacagctgtccgcggcggaaaaggcctttcagccaattgctgaccagctcaacaaaacggtagaagaagcggctgaccagctgattcaagtagctgtcgccaatatgtacacagaattaagcaatgtcatggagcagcaggggtttgacccaagagattttagtttactagcgtttggcggagcaggaccggttgtggcgaatttccttgcgcgagaaatccatgcgaaaaacgtggtcgttcctccaggtccaggaacattatgtgcattaggtgctctgaccgctgattttattcatgatgcggtgctgtcgaagaaaatatgcttacaagactactcgatagatcaactaaaacaagattatgagatgctttcgcgaaaagcggctgattggttcagtcagcagaacattcagcatattaaacagacatccattctattattggcagacgcacgttatcaaggacaagcctttgagattgaattaccactatcagctgaatggctgaagcaagaacaagatatccatcaactcattgaagcctttcacaaactgcatcaacgtcaatatggtcatagagatgatcaggcggacatcgagtttactcatttacgagttcgagtcataggcgagacgccgccgctgcctttcacacctgttcatgaaagcagcggacaatctttgaagccatatgaatacaggcgaatctttatagaagaaaaagaacatgaagcagctatttattacagagatactttgtcagtaggttctgtcatcaatggacctgccattattgagcaggatgatacgacaacattgattctgccaaattggacaggcagcattgatcaatcagggaacttggtgatttcaagggaggcggctttacatgagaactgatccagcaaagcttgagatgatgcgcagttattttaatgcaattgcgtctggcatgggacatgtcattgagcggacgtcttttacgactttcgtcaaagaatcagctgactttgcgacagcgttagccacgccttctggagatttctttgtttatccgaagacagtgggtgtaacgatctttttagggctgagtcttaaaaaagcgattgaagagagcggggcgatgcagccgggagatattatcatcacaaatgacccttatacgacagatggtttagcgactcacctgccggatgtccatatcattaagccaattttcgtagatggtgaaattgtcagctatgcttggtcttttgttcatgtgagtgatgtgggcggacttgtgccctcgagtatttcaccgacagcaacagatgtccatcaagaaggattaagaatcccgccagtgaaaatttatgaaggcgggaaagagaatcaggtcgttcgtacctttttaagagccaacagccgagccagtcatttaaatgatggggatatcaatgcgatgattgctgcagtaaatacagcagaaattcggttaaaagaaatgatcggcaaatttggaaaaaatgaagtgaaacaaggaatgatggacctgctgaagcaagctgagattcgtgcaggaaaggtcattgaagccattccggatggaacgagtgaattcgctgattatttagatgatgatatgatctcggatgtgccgatccgattgaaaatcaagttaacggtgaaaggaaagcggctgacgctggatttctctgagtgtgacccgcaagtgaaaacagcttttaaccttgtcactaatggtcagaagcattccttcctatatcaagggttgattaattacattattagtaaagatccctttataccgattaatggcggaataacatatccgattgaagtgatttcacctaaagggacgctggtgcatccagaatacccggcctctgttggtattcggcattcgattacgatgaggctgtataatgtcgtgctaggcgccattggtaagctgttacctgaagcagtgccggcagcaggtgcaggtcaatctgctattgttgttctctctgttcctgatgatcaaacaggtggcaggaaaatgtctgttgtcgaaccattaggcggaggcggcggtgctcaaaatggaacggatggagtagatggcattgatcattcatctggctttttgaaaaatacacccattgagagtttagaacagcatattgatattcatgttcaccgatatgagcttttgccgaacacaggcggggcaggagaaaacagaggtggacatgcgattggtttggaatttgaaatgatcaagcctgaatctatggtgaccgcacgaggaatggaacgaatgaagtttcagccttgggggttaatgggcggccgagcaggagctgttggtgaggtcaagctgatcacagcaaaaggtgaaaaacaagaccagccaaaaatagatgttctgcgtcttgaaaaaggcgatattgtgcaattaatatcaccaagtggaggcggctggggaaatccatttgctagaaataaagaaaaagtccttcaggaagtggaagcaggtctattaagtgaagaaagagcgctgcagcaatatggcgttaaagtgtatctagaccaaaatgaatggaagattgatgaaaagcaaacgaataagcttcgtgaaaaggttgatcatcctgctgatatcatgtgggatttcggagaacacagagaagcttatgagaaagtatggacggatgaagccagcagcgagcttgccgtgcagctgcgttcttacccagctaatgaacgtacgcattataaacatgcagttcatcaacatttcagtcatagaaatgagccgttaacaaagaaagatattattcaagcacttcgtcatatggatggacaaaaagggggaaatgaatcatgaaaagaagattaatcactatttttgcaggtgtactatcaatgattctactgctgacagcttgcggtggaaatggacaggatcaaggtaaacagcagcagactgtgatcgttggagtatacggaggcgattgggaaaagaatatcaaaccaatcctcgaaaagtttgaaaaagatacgggaattaaagtccaaaccgtctctggagcggattctgaatggtttacgaaattaaaagcgtccaatggaaaaaatccaccgtatgacctgcttattttacagcctgatacgattcaaagaggcattgcagcaaatgtccttgcgccgattgacgaagagcaagcaccgaatgtcaaaaaactttaccgttctgtccaaaagaagctcactattgatgggaaacaatatgcagcaggctttagcatggggcagctaggaattgcttatcgaaaagatcttgtgaagcaggaaccaaacagctggacagacctatggagcagtcagctaaaagggaaggtggcgatatcatctccgacttattcagccggtttgcaatttttctctgcgcttgtccatgctcaaggggggacagaatcaaatcctaaggatattgataaagcctttaaaagcctttcacaattaaaaggacatgtagctgcttttccagataatccagggtctattcaaaccttgttagaacgtggtgacgtggcagcagttccatattgggatggacgagtatttgcacttgaagaagaaggaatggatattggtttctcatatccgaaagaaggcgctgttgcagctgttgcgagctgggctttaacgaagggaagtcagcatgaagaagcggcttacaaactattaaactatttaagtggaaaagaagctcaggaggctttctcggaaaaatcttattatggcatgtcgaattctgatgtgaaatacggtgacaagattaaggggaaggtcaaggttggagagaattattatagcaagctgacttgggtagattacgaaacagcaacttcagagcttggcaattggacaaatcgatggaacgaagtattaggcggaggaaaataggtgatcgcatgagtggaatccatttagaacatatcagccagcatttcggcgagcagattgctcttaacgatgtcagtcttacggtgaatgagggagagtttttctcccttcttggccctagcggctgcggaaaatcaacgttattaaacatcattggcggttttttagagccaacaaaaggtgtcgtctatattggtgatcaggatgtgacgactttaccgccttatcaaagaaaaacgggtatggtctttcaaagctatgcactctttccgtatctgaccgtatttgataatgtggcgtacgggttaaaggttcaaaagaaaaagaaggcagaaatcaaagagaaagtaatggaatgtttgtctcttgtgcaattagaggcgtttgcgaaacgtatgccgcatcaattaagtggtggacagcagcagcgggtagcgattgcaagggcgcttgcgattcagccgtctgttcttcttcttgatgaaccgctcagtaacctagatgcaaaacttagaaaaaatatgcagacagagcttcgaaatattcaaaggaatgtcggaattacaaccatcctcgtgacccatgaccaagaggaagcattaagcctttctgatcggattgggattttaggtgagggaagaatccagcagattgggacgcctttagaggtgtatcgccagccaaacaatcgatttgttgctgaatttatcggacaggtgaacctatttgaagcagtatatgatgaagctaaagctgcatttatcgttcctcatttaacccagtcaaacgggcagcatgttgagttaaaggctgcggcacaccaagagaagaaggggaatcatttactcatgctccgtccagaaagaatcagcatatcttctgagtgggaaaacgttcagcccaaccatgtatcaggcgtgctggcagatgtcagttatattggtcactcattacgtttggtggtggggctcgatagcggtgaaatgattgtccatgcttctgatgcagcatttcctgaactgccgaaagctggagaagctattcatatcaattggcagcctgaagatattgttttcctagattcgaaggtgcacacgtgatgcgtatcaagaaaaaaaatcagcgatttcattggttcatgctgctgcctgcgtgtttgtttcttgttgtatttcttctagcgccgcttgtgatgatgttcgtcctcagttttcgcgatgtggattcaatgatgaatacattacaaacgtacagcttttctcaatatattcatgtgttcacgacagatgcgtatgtgaaggcgattggaagtacagtgtgggtagccttgcagacaacggtaatttgtttattgatggcataccccgcagcatacgtgctcgtcaaggcacctcatccgcgtctgcgggcatttttctatatcttacttgtctcgccgcttttgacaagtgttgtgattcggacgtttgcatggattgtccttctttcgcaaaatggtctgatcaatggcatgttattagatttacatgtgattgagaagccgctctctatgctgtggaatatgaatgcggtgattattgcttatgttcaggtcatgctgccttttgcagtgctgcctatcgcgacgagcttaaccgatatggatcgtcatttacgaccggcttctatgagtctaggagctggacgtattcgaaccttctttcatgtgacctttccactgaccattccaggtatggtgactggagctattattgtcttttcactggcggctgggagctatatcaccccgctgttagtcggcggaaggatgcagcctctgctgccgctgtctatttatcagcaggtcatgcaggtgtataacttgcctcttgctgcagcgatgtcctttacgttattggtttgtgtgcttgtggtggtcagtttattaagctatctattgaagcgttgggaggcgaggatgcatgcgtaaaaaatcattaggtgaccgcttgctttcaatcctgatttggactgctgggtcattggtttatctctttttaaccatacctgttcttgtcatcgtcttatctgcttttagtccaaatgcctttcctgaatttccgccgacttcgttctccgttcgttggtttcaagaggtcgtgtcgaatccagaatggatggagtctctgcgtatcagtgtgattttgctattcatcgtaacgccgctcacggttcttttaggcacgatggcttcgtatgctttagcaaggcttacctttaagggaaaggaggccatccaagccttcattttgtcaccacttatgattcctcaggtagtgttggggattgccatgctttatttgtttacggctatggggtttacgggatctttgtgggcgcttgtcataggtcacgtcattattggctttccctatgtggttcgaacagtaggcgtcagtgtctcgaatttggacccgcagcttgagctagcttcaatgaatcttggcgcaggacccattcgcacattctttcgagtgacgctgcctttgattaagccaggaattattgcaggcggagtgttttcagctgtgacgtcatttggggaaatatcgatcagtttgttcgtttcctctccccaaaccattacgattcccatcaggacgtttaattacattgagcaaacctttgatccgagtgtcaatgcgatatctgtcatatttattatcatttctatcattgcgttgctcatcattgagaaaacgattggcctgtctaaggtgatgtaaatataatgaagaaacaagggagctgtcatttgaaatggcagctctttttgtgttgtttttacggtaaatattttcaatttttcagggaatatagttcttaagatttaagaaattttggagaatgaaaggagacctctatcctgcattttcggtcatatttgcaaattttaaggggaaacatgaaatttttgcggtatttagtcgattattttcggttgaacgcaactattattagttattttcggtaaatatcgtaaattatcatgtgattcattcggtataacgcatgaatctttacacccatttttcggtgaaaaaaacaataatttcatataaagtggacgtaaatagaaaatatttaaaaagaaaagaagaaaaaggcaaatctatggaaacgtagagacgcaaagccatgtcctaaggtgaaagttgcttttttactatggtcggcaggttaccgaatcaaaatgggagtccctccgttttattcggggtgggcttctttccgtatttcgtctatttaatcaaatagacttggttcttttgatatagagggtgcagggtgtcacattggtggagaaaacatagaagaggcggaggataagaatgaatacagtttattaccccttaacacatgcgcaaaagcgagtattctacacggaaagattttatccaggtacaagtatttctaatttgggtggattcgccagattgagatcggtatcaggtttagatccatctttagtcgttgacgtgcttcaagcgtacattcgccaaactgactcccttcgtttgaggctggtgtatcgacatgagcaggaggagcctgttcaatatatgaagccttatgaagaacagccgattcgcatggagaagggctggagtgaagaagaagtgagggcttgggcgaatgagcaaatccgtgagccaatgccgttaattgacagccccttgattgaatttacggtctttcaaatcagtgatcaagagtgctggctgttctgtaaagcacatcatattgtggcggatggtatctcgattatcttgatgggaaatcgcattatcgacttataccagaacatgctgcacggggtagacatctcaccggttgaggagatttccttcgttgatcacatcatgagtgagcaaagctatgaaacttctaaacgatttcaaaaagaccaagccttttggaatgagcaatttgccaatattccagatttcgcttctttaaaaccgcataagggatacgagatgagtttacatgcgcagcgattttcgggggatattccagattctttgaaggagaaacttcgtgctttttgtgaagagcagaaagtcagtatgctctcgatgtttatgtccactgtttatgtatatttacatcgttttagcggcatggaggatgttgttcttggaacctttatgggcaaccgaacgaatgccaaagaaaaaaagatgattggtatgtttgtttccacgattccaatgcgtgcatctgttcatgggtcgcaaacatttcttgatttcgtaaaacaggtcatggcggatcaaatgaagatcttgcgtcaccaaaagtacccttacaatctcctcatgaatgatttgcgagaaagagaagggtttacagggcgcctttttgatatttctttagaataccaggtcatgcagtggcagaaaaaagagaatctgtcttttattactgaaccgatttttagcgggagcggaatgaatgatatttcaatccatgtaaaggaccgctgggatacagatacattgaccattgatttggactaccgtacagatgtattcaccgaagaagaaatcagtaatatgtttgatcgatttttgatcatactagaggcggcggtctctcagcctgatcagctgatcgggacacttcctttacttccatcagatgaacaaaaggaactgctgcaactatctgagagaatcccgtttgaaaaaccagctgaaaaaccggttcaccacatgtttgatgagacagcaaataagtatgcagagcggacagccattgtagcggaaaatggagcatttacttatggagagctgtatcaaaaggcagaaaagctggcgcggtttttacaaatgaaaggtgtctcgcgtgatgtgcctgttgctgtcctaatggatcggaaggcagatgctatggtggcgatcttcggcatattaaaggctggcggggcgtatgtaccgattgatccggcattacctgaggagcgcattcaatatattgtggaggattctggtgcttccattgtgttaacagaggaatcgttcgtttcaacataccgtgccctctcggaaaaaatggtcgttcagcagcaaatcgaattagatgatggtctgctgcctgcgcttgtaaatcagtcggcacctgaggatttggcttacatgatttatacatcaggtacgactggaaagccgaaaggcgtcatgattgagcatcttcagctgcatcatttggtccatgccttgcatcatgagatttatcaaggggcgagtgagcttcaaatggcgcttcttgcaccattccattttgatgcatcggtgaaacaaatctttgctgctcttttatttgggcatacgcttcatatcatcccgcgagaaacgacgagaaatggtgttcaattagcggcttattataaaaaacatcaaattgaagcagcagacggaacaccggcgcatgtgcagcttttacttgcagcggatttggacgggctgtcattgacacacatgttgattgggggagaagcattgcctgcgaaagcagcacactctcttatcgaagcgcttcgtatgagtgagcctgattttactttgtggaatgtgtatggtcccactgagacgtgtgtcgatgcggcggttcatcgtctggaactaagtgagctgcgcgaatcatctgaacagcagcgttatgtgtcgatcggaaaaccactcggtcatcaccgtctttatattttaaatgaccatgatcaattacaggtgcagggggctattggagagctatgcattgcagggataggtgttggacgaggctatgtgaatcagcctgaattaacggagaaggtattcacgacagatccgttttctccacacgagcggatgtatcgaacgggggatctagtcagatggcttccggatggcaccattgattatcttggcagaatggatgatcaagtaaaaataaggggttaccgcatagaaacaggcgaaattgaagcagtgatggagcaggtagatggagtcgatcaagctgtcgtacttgtggttgatgaagcggacggggaaaaggcgttaagtgcttactatcaagctcgtcaagaaggtgtgtcagttgacatgctgcaagccgctatcaaacatcagcttccagcttacatgatgccgctctatttcaaagagctcgatgcatttccactcacagtcagcggtaaagtcgatcgtcgtgcacttgctgctttaaaaggcgacaaagcagttcatgctgtatatgttgcacctagaaacgatctcgaaacgaagcttgtgcgtttgtgggaagaaatccttggtcaagagaagatgggtgtatatgattctttcttcgagcgaggtggtcattcacttaaagcgatgacagtactcacacatgttcagcgagactttcaggtggaagtgccgctctccattttatttgaacagcagaccattgctgctttggctgcctacattgagcaagcggaaacatcttctgaaacggtgataccaaaagcgccggcagcagaccactatccattgtcacctccacagcagcgcgtttatatggtgagtcaattggagcaaagcaccgcataccatatgccggctgttgtgaggttaaaaggaacattgcagcgagagaagctgactgaagcctttgaaagactcatcacacgtcatgatatgctgcgtacttcttttcatacgttgaaaggtgttccatgtcagcaggtagctccatcagtgccatttcaaatagagcagctgacaggcggcacgatggaagaaaatatgcagcaatttgtcagaccttttgaccttgagtgtgcaccacttcttcgtattggcttgaagtcattacatgatcaggagcacctgctctttttcgatatgcatcatctcatctcagatggtctttcgattgatttaatgctgggtgagctgtcagatgcttacgagggatcggtcaaagcaccattgaagcttcaatatcaagattatgctgtttggcaagaacagcaagattttcaaaaagaagaggcattctggctgcaggaattttcgggtgatcttcctgctttacagctgatgaccgattatcaacgcccagcggtccagtctttcacaggggatcgtgtgatcaaagaaatagatgaaacgttaaaggaacaattgcaggagcttgcggcaaaacaccacacgacactgtatacggttctgctttctgcttactatacattgcttgcgaagtacacgggtcaacaggaattcgtggttggaacaccggcggcagggcgtgtgcatgcagacctggatgacatgatcggcatgtttgttcagacacttgctttgcggtcagaggttgatccgaatggaaccgtgtcgcagttgatcgagcaagttaaggaaaaaacgatgcatgcatttgagcatcagcaatatccatttgaacggctgcttgaaaagctgaatgtaccaagagattttagccgtcatcctttattcgataccgtttttacactcatgccagatcatggagcagcccagcatattggagagatgcaagttgaaattgaagaaaccaatttccatattgcaaagtttgatttaacgctgcaagcgatggagtcagatcaaggtttatcctttgtcctcgattacagtacggcgctatttaaacgaagtacagccgagcaaatgctacatcattatatgtatttgctggagcagatggtccaatcgccggaggaagcgattcgatcctatcgattactgtctgaacaggaagcggaagctcaactgaatctgtggaatccgttaccgacgccttatccggcagaagaaaccattgtgacgcagtttgaagcacaggtgcaggagcatggtcataagtctgcactccaatgtgaaggtgtgattctttcttaccaagaactgaatgaccgagtgaaccagctggctcattatttgcgtgaacatgggtttgaaagagggatgaaagcggccttattctttgagcgatctaatgaaatggtactctctgttctagctgtacttaaggcgggcggcgtctatgtaccaattgatcctgatttccctgatgagcgcgtgaagcactttttgacagacagcggtgcgcgattcttattgacacatcaagtgctgcgccatcgctcggtactcgcttctttcgagggaaccatcatcgaaacagaagatcaggcaattgaccagcaatcagacagccctatagatgttggtattttaccagaggacttggcgaatttgacctatacatctggtacaacaggaaaacctaaaggaaatatggtgacacaccggaatattttgagaacggtgaagcaatcaaattatcttaccattcatcatgaagacacggtgatgagtctatcaaactatgtatttgatgcttttatgttcgatgtgtttggtgctttattaaacggtgcgaaactgattgttctgccaaaggatcatatcttaaacatgaatgagctttctggagcgattgagaaggaagaagtcagtattttaatgatcacgacagctctttttcacttactcatcgatatgaaaaaagacagcctgaagaacgtcagaaaagttctgtttggcggagagcgagcttccgtgcctcatgtcatgactgcacttgaaacggtgggggaaggcaagcttgttcatatgtacggtccttctgaaagcacgattttcactacgtattatccagtgaatcacattgagaagcaggcgttatccattccaattggaaagccagtgagtcaaacggctgtttacattgtagatgaatttggacatgtgcagccgccgggtgttgcgggagagctatgtgtcgctggtgatggactggtgaaaggatattatgggcagccagaactcacaagcgaaaaatttgtggaaaatcctttccgccctggtgaggtcatgtataaaacgggtgatcttgcacgatggctgtcaaatggagagattgaattcattggacggattgatcatcaagtgaagattcgaggtcagcgtattgaacttggagaaattgagcatcagctgctgcgacatccgcaattgaaggaagccatcgtcattgcagctccaaatgatacattatgtgcgtatttcacagcagaagggtctgtctcattaactgatttgcgcgagcaagcagggcgtgaactgcctgtgtatatgatgccgtcgttcttcatgcaattagacgagcttccgctgacgaataacggcaaggtagataggcgcgccttaccggtgcctgacctaagtgagcagggggtaaatgagtacatccctcctcaaaccgaaacagagcatcacgtagcgcgcatttgggaggaagttcttgaagtgccgagaatcggcagggacgatcatttctttgaatgcggtggccattcgctgcgcggcatgaaaatgctgaacaggctgtatgaagagatgcacgtggagctcactttgaagtctttatttgaattcccaacattagaggcgtttgccttggcggttgatcaagcggatcaaacggaaattaagcgagtggagatcgccgaagaggcagcctattatccagtgacatctgctcagaaaagactgtttgtattggagaaaatgaccgatgcggagcaaagctatcatatgccggctgctttaaagctggaaggggcctttgatgaaaaacgatttgaaaaggcgattgaacagcttgtccatcgtcatgaagcattccgaacgagctttgactttgttcagaatgaacctgttcaacggattgaatcaaatatttccttagacattgaggaaatcgaagggaacggaagagacatacaggaattgatgaatgactttatccgtccatttgatatagaaaaggcgcctctactcagagtaggtctagtttctgcttccgtaaatgttcattatttgctgattgatatgcaccatatcatttcagatggtgcatctgtgggcattttaattgaggagctttcagccttgtatcgaggggacaaactagaggaattacctgttcaatataaggattatgcggtttggtcaaaaagcgagacgtttgctgcacaaatagaagctgaagaggcgttttggctggagcaattacaaggagaactgcctgtactggcactgccggaagacctgccaagaccaaaagtgcaaacattcgcaggagagcgcgtctcatttacaatcaatgggccgcttaaagcgaaattggatgagctggtcagagcgctcaacagtacgacgtatacagtcctactcacttgctacagtacccttttaagcaagctatcaagacaagaagatatcatcatcggttcaccgattgtgggcagaactcaccctgatattcaatctgtcattggtatgtttgtgaacacgctggcacttagaacaaagccagcaggacatctgacagctgcagaatttgcgtcaaatgttcatcaacttgtgttagaggcaaatgagcatcagttgtacccatttgaagaattggtagaccaagtacaaacggttcgagacactagccgtcacccaatctttgatgtggtgttctcgatggaaaatgcggatatccgtgatttaacgatggatggacttcacatcgttccagagccatttgaagaaaatatcgccaaatttgatttgaccttaactggaaacgaatcggctgatcacattgagcttgtgttcgattttaatacttctatctttcaacagtcttcgattgaaaagtggaaggagtttttccttcatttattggaacaaatggtatcagcgccagatcaatcgctagatcaaatgcagctattatcaccgaagcagcagcaaaaactgctcagtgaatggtcaggtcctgtcctagacgttccgtcagatcaaaccattcataaactgatcgaggctaaagcatttgaagcaccgcaccaaaaagcggcaaccttctgcggaacaagctggacgtatgaagaactgaacagtcgggcgaatacagtcgcttcaaggctcatctcaaacggcataaaacgaggagatcgcatcggcattctcacccgtccgtcccttgatatgacggcagctgtccttggcgtcttgaaggcaggtgcggcattcgttccaatcgatgcggattatccggatcagcgcattacctacatgctggaagactgcggggcagaggttcttttgatgcaaaaaggattgactgcaccatcttcattcacaggtcatgtcctattgatagaggatgccgtaaaaggtgaagcgcaagaaattcagattcatatgaaaccgactgatctcgcctatatgatttacacgtctggaacaacaggacagccgaagggtgtcatggtcgagcaccagtcccttgtaaacctagcgttttggcacaatgatgccttccaagtgaccaatgcagatcgaaccgccaaatatgccggctttggctttgatgcctccatttgggaaatgttcccgtcatggatcgccggcgcagagctgcacatcatcgatgaagcgattcgtctcgatatgatcaagctcaatgcgtatttcaatcaagaaggtatcaccattgcgttcctgccgacccagttatgcgagcagtttatgtcaatggacaatcattctctgcgttacttactaacaggcggagataagctgaaacagataaagcctgttccatataaactcgtgaataactacggtccgacggaaaatacagtcgtggcgacaagcgggattatcaatccagatcaaggaacgcttccaatcggaacagcgattgccaatacacgtttttacattatgggttcgttatatgacctctcgccgccaggcgtaccgggtgagcttgtgatcgcaggaaaaggactggctagggggtactggaatcttccggaggaaacagataaacgatttgtcccagatccattttatccaggtgagcgcatgtatcgcacaggcgacttagtgaaatggacagaggatggcgagctgatctatctcggcagaaaagaccatcaggtcaatatccgaggcttccggattgagctatcagaaattgaagctcagcttcttgagctggattcagtcaaagaagcagtcgtgacaacggtgaaagatgcaagcgatcaagacgcccttgccgcatatgtcatcacggagaatgaaacagaagacttaaaagaaagcttaaaacgcacgttgccagactatatggtgccttcatggatcatcaagctagaccaactgccgatgacggcaaatggcaaagtcgatctgaaagcattgccagcgcctgatatggaagccaaccaaacggcttacgaagcgccaagagacgaagtcgaaacgcttctatgcggaatttgggaagacgtacttggcgtgagccaagtcggcattcacgatcacttcttcttccttggcggagattcgattaaaggcattcaaatggcaagcagactcacacaagcgggctggaagctcgatatgaaactactattccagtacccaacgattgcagagctacgcccatatatcgaagaagctgatcaactgacagccgaccagtcacctgtcgaaggggaagtcattttcacaccgattcagcgctggttctttgagcgaaactttacgagtcagcaccattggaaccaatcggttatgctccaagcgccaaatggtttggatgaaaccatcgctcagcaagtgttggagcagcttatgatccatcacgatgccttgcgaatggtgtatccgcttgaagaaggacgcgtgatccagcgtcatcgaaaaatcgaagaaaacttggtggctgttgatgtaatggaagtacgaggggaactgtcggagcaaatcctgcaggtagaaaagctggcaaatgaagtgcaggcgagtatatcgctagcggaaggacctttagtaaagccagctattttccgaacggatcaaggggatcatttactgctcgctgtacatcatcttgtcatcgatggtgtgtcatggcgtattttccttgaagattttatagctctttatgaacagtcgaagcgcggggaaatcctgacacttcctgaaaaaacacactctttccaagaatatgcccagaagctgacggaatacgcgatgtcagatgagttgctgtcggaaagagcctattggaaaaaggtacttgcgcattccgttacaccgattcaaaaggattatgtgacagaagatcagcggatgcttcatacacagaccattcgttttacattgtctgaggaggaaacacgcagtctgctgacagatgtacatgaagcatatcaaacagacatcaatgatattttgctgacagcacttggattgtccatgaaagagtggacaggtgaagacagacactttattcatcttgaaggacacgggagagagaacatcctccctgcaatcaatgtatcacggacgattggctggtttacaagtatgtatcctgtgttactggatatgtcgcatgcagacgatctttcttatcagatcaagcatttaaaagaggaactcaggcacattccgaacaagggaatcggctatggcatattaaaatatttaacccctgacaagatgaaggacgatatctcatttgatctcgcgccagatatcagctttaactatcttggtcagtttgatgaacagatcagcggtgagttaagccgctcaacgtggcatccaggacaatcgctgagtcctgaatcagagaaacctcatgcacttgatattgtgggattcgtcgaacaagccatgttccatgtgacgatttcttatcatcaacttgaatttgaagaacgtacgatggaacaattcaaggatcttcttgaaaagaatgtgagggcgctgatttcacattgcgtatcacaggaggaaacccagatgacacctagtgatgtaggggatgaagatctcacgatggatgaacttgaaaagctaatggatatattttaagcaaacgaagaggtggacatatgagcaagcagaagattcagaaggtatatcctttaacacccatgcaggagggcatgctgtatcatgccatgctagaccctaattcctcctcttatttcacacagcttgagcttggaataagcggagagtttgatctcgctctttttgaaaaaagtctcaatgagctcatacggacatatgacattctccgtacagcttttgtttatcaacaattacaaaagcctcgtcaggttgtactggctgaacgtcatctcgatgtgtatcgagagaatctatcacatctgaatcatcaagagcagcaaaaggtattggatcaatataaaaatcaagtgagaaagcaaggatttcacttaacaaatgatctgttattgaaggtcgctgtttttcaactaaatgaaacaaactggcatctaatttggagcaaccatcacatcatcatggatggttggtccatgggtgttttaatgaaaaaactgtttcattactatgaatcttttcggaacgatcgaacgccggatcgctcacagggaaagccttatgcagattatatccagtggcttggaaagcaaaataaacaagaagcggaaagttattggcaggagcgtctagatggagcggttcagcatcaagggctgttgcagcaaaatgaagcgaacggacaatacgaccatcaggaatggacgtttacatgggatgctcaaacggtacaagccattcaaaatgtagcaagaaaatgccaagtgacagccccgaacctgtttcaggctgtctggtctgttctattaggcacctatcatgcagctgatgatgtcacattcggcaccgttgtatcgggcagacctccaagtgtatctggaattgagcgcatggcagggctgtttatcaatacgatacccgttcgagtgacattggatcaggggcagacgttcaaacagttgtttcaaaaggttcagcagcatgcactggaagcggaaaactatgattttatgccgctttatgacattcagcaaaagacagctgctggagggcagctctttgatcatttggttgggtttgagaactatcctttagatcaggagctgtctggtgataccatgtctgcacggcttggtttttccattgatgtaaaggacggatttgaacaaacgaatttcgacctaaatgtccttgtttatccaggtgaaacgtggacattgaaaatcaaatacaacgccatagcttttgaagaaaagatcattgaaaacatatcaaaacatctgaccaatctcatgaagcaaatcatccagaaccctgatgtacgccttcatgaagtgacatgtatcacagaagaggagaagcagcagattgaagcttggaatcagacagagcgagattatccgaagcatctgtctattcctgagctgcttaatgaacgtatgaaggcgcagcctgaccatctggcattagttgaaggcgatcgaacattcacgtacgaggagcttggacaagaaatccgtcgtttagccggcagtcttgttgaaaacggcgtacagcccggagatgctgtcgcggtgtatatgaaccgatcagcagatgcggtgatcgccattttagcagttctgcacgcaggggcagcttatgtgccgattgatccttcccagcctgaggagagaatccgatggatgcttgaagacagcggcgcatccattttgctgcatgctgacaatcagccgccagttgatgaacatatcaaggctgtacatgtgaccagcatgcctcatcgctcacacgtggatttctcagtccggacgtctccatctcaattggcgtatatcatgtatacatcaggatcaactggacagcccaaaggggttcaaattgagcatcagcatattgtgagattggcttgctctcaggagaaattaggcttgaccaagtcggatcgtatggcgcatacaggggccgtcagctttgatgctattacctttgagatatttaccacgctgctaaatggggcgacgctttatcctgttgaccgtgatactttattggatatccatcgattcgaacaatttatccaaacacatcagttgacggcgctctttttaacaactggattatttaatcagctcgctcagcagcggccgcaaatgttcgaaggattaaccacattaattacaggcggtgacgtcatcaatgtgaagagtgcggagcttgtgaaacagcatcatccagcacttgttttactgaatgcctatggtccaactgaaaatacaaccatctcgaccatttacgaagtaacaggagatgaaacgggtccgatcccaattggtcagccgatcaaccattcgtcggcttatattttagatgatgatcaaagattgcagccaattggagcgccaggagagctgtatgttggcggagatggtgtcgcaagagggtatctccatcgtccggatttgaccaatcaagtgttcatggcagatccttttaaaccgtcaggccgtttgtatcgaacaggggatttggctagatatggcgcggatggccagatcgaattcctcggccggacagatgatcaggtgaaaattcgaggcttccgtattgagcttggtgaaattgaaacagtgcttcagcaaaaagcgggcatagatgatgcggttgtgcttgtccatttgttttcctcagatgaacaggaaatcaccgcttacttcacagggacaatgacagaagaagaggtgcgggatttattcaatcaagagctgccagcttatatggtgccgcaccatgtgatgaagctggatgcttttacgctcacatcgaacgggaaggtagatcgaaaagctttaccaaagccggacgaagcgcatcaggagaaaaaggaaatcatttcgcctgagacggagacagaaaaggcactcgctcaaatttgggaggagctccttgggaaaacggtaggagtagatgaacatttcttcatggctggcgggcactctctcaaagcaatgatgatgtccgcgaaaattcaagaggtgcttcaaaaggaagtaccgattcaagtgatttttgagaagccgacgattcgttcattagcggcatatatcgatcaggatggtcaagaagaaaaaggacatcccatcttaccagcagagcaggcggacgaatatccggtatcaccagctcagcgccgtttatacattttgcagacactcgaacctgacagcacgaattatcatattccgatcgtcttaacgcttgaagggacactcgaatatcagcggctcagatcagcatttgatcagttgatccaaacgcatgaaatcttaagaacgagttttcatataaatggagaagacatcgtccaaagggtgaatgaatggactgcatttgaccttcccgttcatgacatcaaagaagaagaggcagaggcattcctttctgaacgtcaaacaccatttgatttaacagctgcgcctctattgcgagctcagttgttgaaggtcagtgagaaccgtcatcttctcgtcttggaagcacatcatctcattacagatggcagctccatgaagacgttcattcaagatttggcgaaggcctatgatggagaagctcttgcagaaagagccattcattataaagattacgctgtctggcagttaagtgaagaagagacggagaaacagaaggagcatgaagcatattggttgaagcaattcgaaggggacttgccggtattagagctgccaactgattatctgcgtccagcggaacgtgatttttccggggaacgattcatgtttggctgtgatcaagcgacgactcagcggattcatgaactgcttcagaaaacagatacgaccatgtacatgttcttgttatctgcttttcaagtgctgcttgccacttatagcggccaggaagatatcatcgttggttcccctgttgcaggacggacacaccctgatatacaggacatgccggggatgtttatcaacactgttgcgatgcgcggaaaaccagaacaaacgaagacatttttacagctgcttgaagaaataaaagaaacgagtgttgacgcttttgctcatcaaagctatccactggaagagttaattgcacgccttccgctagatcgtgatacaacccgaagcccgctctttagcgtgtcatttaacatgcagaacatggaggttccggcgctaaagctcggcgatctgcacatttcgccttatgccattcagcatcactctgtcaaatttgacttgtctctagaagcatttgaacgagagggagcattaaagctgagctttgactatgcagcggcattatttaaagaagagacggtccgcaggttcggaactcatcttctagcgattattcgtgaagcggtccaacacccggatgaacagatcggcttgctccgtatccttgatcagcatgagcaaatagagcgattggagaaaaaagacgaagtgcaatcgaatcgtcatgagcccttccatgtccaattttcgcgtcaggtaaaggaaacaccagatgccattgcggtgatggatgatcaacggaagctcacttaccgcgagctggaagacatggcaaatgcgcttggcagtgaactgaaggtacgaggcgtcgagaaagaaaagactgtagcactgattcttgaccgctctgtctatgtcatcgtctcaatgcttggtgtgatgaaagcaggtggtgcatttgtaccaattgatccggccttccctgcggaacgtatccgttacacattagaagattcaggtgcacaagtgatcgtgacaaatgagtctcttgcaggttcctatcaagatcacaagtcgattcaggtggtgcaggttgaaaaagcagtgcagcaaagccgctcgctagatctgccggaaggctcagccgatcagctcgcttatgtaatatacacatctggtacaacagggaagccgaagggtgtacagctcacacatcgtaatctatcacactatgtcaactggctgacaaatgaggtgacattgcaagaatgcgatcggacggcactgctttcttcttatgcatacgatctcggttacacaagcattttccctgttttaaaagcaggggggacactctatgtgcctcgtgaagatatgtatacagacccggtgcgtctcatgcgtttgattgatgaacaagagctgacgtatatcaaaatgacaccatccttatttcatatgatggcagattcgaaggatcatgcatttaatgctttacgccttgtgatacttggaggggaaccgattgtctctgaggatgttgaaacgtttatggagcagcacccatgtgtggcagtgatgaaccactatggcccgacagagacaactattgggactgtgaccaagctgatcacaccgcaagagctaggcgctttgatggatcgctctgtgatcgggcagccaattgctcacacaagagcgctcgcactcaatcgtcagcagcgccttgtcccttatggcgcacctggagagctttatatatcgggggaaggtgtatcgagagggtatttgaatcagcctgaattaacagcagagcgttttcttgaaaatccatattatcctcaggagcgaatgtatcgcacaggggatttggtcagacagcatgcaaatggagacattgagtttctcggaagaatagatgatcaagtgaaaatccgcggttatcgtattgagaaacaggaaattgagcatgccgcgcgtgcacgattatccattcaagaggtgtatgtcaaagtaattcacatgtcccgtttaccggagcttgcactctattacacagcgcctgagccaattggaacactgacgtttagagaaaagcttgcggagacactgccggattatatgattccaacgtactttgtcaaagtcgaccacattccgctcacacaaaacggaaaggtagatgcgaagtctatgccgcttccgcacgaggtgcatatgaaccgcgcggtgcatgcagcaccagaaacggcacttgagcagtcgctgtgtgacatttggtcagaagtacttggggttgaacaaataggtgttcatgatcacttctttgaattgggaggtcattctctcaaaggcatggtgctcatttcgaaggtacaagccaagctgaacaagcatgtgccgctcaaagtcctttttgaaaagccaacgatacgggcgatggcagcctatttggaagaagtggattcttcggacatcacatccattcatccggcggagaagcaagatttctatcctgtctcttccgctcaaaagcggatgtatgtgttacagcagctgcatccagaagcagttacttaccatatgccagctgttttgatgatggaaggcagccttgatgtgaagctgctagaagaagcgctgcaagccttgatcgaacgacatgaatcattgcggacagcctttgtagaaattgacggcgtaccagttcaaaaagtctatcgccgaatgccgattacgttagaggttgttgaagtagagagaggtcatgaacaacctgtcatagacgcattcatcaccccattctcattacatcaagcaccattaatgagggcaaaggtggcgaagctttctaatgaagaatatgtgttcatgatggatatgcaccatatcatcgcagatggtgtcacacgcagtttgctcattcaagaattggcagagttgtatgagaaaaagacattaccgccagttcagctgcactacaaggattatgcggtatggcagcaggaagaaaagcagcaagcgctgctcgagaaacagcgtcaatattggctagagcaatacgctcagccgcctgaagatttggcgctgccacttgattttccgcgccctcatgttcagtcatttgaaggagaccgagtcgatagatggttatctgctgaaaaggtgcagtccattaaaacgctcatggctgaaaaaggtgtaagcttgaacatggtcatgcaaacggcatttgccattttcctttccaaattaactgggcagacagatatcgttataggcgctgtgacagcaggacgtacgcatgcttcaatggaacgggttccgggcatgtttgtgaatacactggctcttcgacatgaagtgcagctggaggaaacgacagcacaattgcttgaaaaaatgaaagatcgcagcctatcagcctatgaacatcaagatttcccgtttgaggaattggtggcacagttagatcttccgacagacacgagccgcaatccattgtttagtgtcatgctgacaacggatgaccgagacctgacgttaccggatctggatggactcaagctttcgcaaaaacagcaagagacagttcaagcaaaatttgatgtaacgctcggtgtatttgaagaaaaagaccaagtgggcctgcgttttgagtatgcagcggcactgtttaaaaagaagaccattcagcgttggagtcaatattttgaacaaatcatagacgaaatgctggctaagctcaatcagccaatttcagcgctatcgatcttaactgaagaggaaaaacgagaactgatcaatgaatggtcaggtcctgtcctagacgttccgtcagatcaaacgatccatgaactaattggagctaatgcgcacaaagcgcctcaccaaaaggcggcgacattctgcggaacgagctggacatatgaggaactgaacaatcgggcgaatgtagttgctcagaaattgatctctcttggcacaaaacccggagatcgcgtcggcatactcacccgtccatcgcttgacatgacggcagccgtccttggcgtcctgaaggcaggtgcggcattcgttccaattgatgcggattatccggctcagcgtattgcgtacatgctagaggactgcgaggcagaggtgcttctgatgcaaaaaggactgactgcaccaacttctttcacaggtcatgttctgcaaatagaagatgccgtagaaggagaagcacaagaaattcaggtacatgtgaaaccaacagatctcgcctatatgatttacacatcgggaacgactggacagccgaagggtgtcatggtcgagcaccagtcccttgtcaatcttgctttctggcacaatgatgccttccaagtgacaaatgcggatcgaaccgccaaatatgccggctttggctttgacgcctccatttgggaaatgttcccgtcatggatcgccggcgcagagctgcacatcatcgatgaagcgattcgtctcgatatgatcaagctcaatacgtatttcaatgaaaaagggatcaccattgcgttcctgccgacccagttatgcgagcagtttatgtcaatggacaatcattcactgcgctacctactgactggcggagacaagctgaaacaggtaaagcctgttccatataaactcgtcaataactatggcccaacagaaaacacagtcgtagcgaccagcgggatcatcaacccagatcaaggcacacttccgatcggaacagcgattgccaatactcgtttctacatcatgggttcgttatacgacctctcgccgccaggcgtaccgggtgagctcgtgatcgcaggaaaaggactggcaagagggtactggaatcttccagaggaaacagagaaacgatttgtcccagatccattttatccaggcgagcgcatgtaccgtacaggcgacttggtgaaatggacagaggatggtgagctgatttacctcggcagaaaagaccatcaggtcaacatccgaggcttccgtattgaactgtcagaagttgaggcgcagctccttgcgctggcggaagtcaaagaagcagtcgtgacaacggtcaaagatgccagcgaacaagattcgcttgtggcatatgtcatcaccgatgaagaaacgaccgacctgaaagaaagtctaaaacgaacgttgccagactatatggtgccatcatccatcatcaagcttaaccaactgccgatgacggcaaatggcaaagtcgatctaaaagcattgccagcgcctgatatggaagcaaaccaaacggcatacgaagcgccaagagacgaagttgaaacactgctttgcgatatttgggcagatgtccttggcgtgagccaagtcggcattcacgaccacttcttcttccttggtggagactcaattaaaggcatccaaatggcaagcagactcacgcaagcgggctggaagctcgatatgaagctattattccagtacccaacgattgcggagctgcgcccatatatcgaagaagccgatcaattgacagccgaccaatcaccagttgaaggggaagtcattttgactccaattcaacgctggttctttgagcgagcattcagtgaccagcaccattggaatctctcgatgatgcttcatgcgccaaacggatttgacctttcgattacagaacaagtgatgcagaaattactttcacatcatgatgcactgcgtatggtatacaggcaggagcatgatgacattctgcaatacaatcagcgggagctcagggaatcgattgcgattatttctcatgatgtctctaaagagcacgacgtgaaaaaggccatttccacatatgccaacgagtatcagcgtcagctgaacctcgaaacaggtccactcatgaaagtgatttgtttccgtgcaaaagatggcgatcacttactcatcgtgacacaccatcttgtcattgacggtgtctcatgccgaattttactagaggattttatgtctctttatcagcaggcagctcaaggacaaacgctcgtccttccgccaaaaacccattcctttaaagaatgggcagaggcaatcgaacgatacgcacagtccaagccgttaaaaagccaaagtgagtactggacagagattgacactctgccattgaccactttacctgttgatcatgaagtaacgaaaagaaaagttgctcaaacaaaagcagtacagatgcagctttcagagtccgaaaccgagcatctcttaaccgatattcatctaccgtacacaacggaaatgaacgatattcttctatgtgctctcgggcttgccgttcaggagtggacagggaagtcccatgtacatgtgcaacttgaaggtcatggaagagaggatattttatcagggctggatgtctcccgcacggttggctggtttacgagtatgtatccagttgttcttgaagcaaagccggatcagaccatagctgatgctattaaaggaacgaaagagatgctgcggcgtgtgccaaataaaggaattggctacgggattttgaaatacatgacagccactgagccgtcaggacagcacgtacatcctgaaatcagcttgaactatcttggacagatcgatcaggaagtgacgacagaactctttggaccgtccacctatgatatgggacgacaagcaagccctgattcagaagctgtctataagctgaacctcagtggtcttgttcaacacaatcgattcatgttgtcgtgttcctattgtacagatgaatatgaagaacaaacgatacagcagttcatggcattgttgaaagaaaaaatccaatccatcattacccattgtttagcgcagcacgaaagagaatttacgccaagtgacttctctgcggctgatcttgaaatggatgaaatggacgacatttttgacatgcttgaggaaaaattgacctaacaacacgagatcagtcatacaaacgggaagggaggatgaaatagatgagttcatttaaaagggatcaagttcaagacatgtattatctgtcaccgatgcaagaaggaatgctgtttcataccctccatcatcaagaaaagggcttttatgtagagcaaatggatatgaacgtaaagggcacactgcgtcatgacttacttgagaaaagcatgaatgtcatcgtggaacggtacgatatttttcgtaccgtatttctccacgaaaaagtgaagcgccctgtccaagttgtgctgaagaaacgcccttttacgcttgatgtggtggacatgcaggatctttctgaagacgaacagcttgtacgtattgagacatttaaacaacaggatcagctgagaggatttgatctctcgaaggattctctcatgcgggcatccgttttccaaacgggtcctgccagctatcgctggatatggagctatcaccatatcctccttgatggctggtgctttgggcttgtggtgcaggagttatttgcaatttatcatgcacttttgcatgacgtcccttacaagctggaaccggttaaaccatacaaagaatatattcaatggctggaaaaacaagataaacaagcatcacttcaatattggcagcaatcattagccgggtttgatggacaatcaacctttaaagaacagagaaaacaaacgaatgaacatgaattaggcgaaatggaatggtcgatgagcaaagaagaaacggctgctttatcagagttagcgttgcagcaaaatgccacgttaagcagcgtgcttcaatcggtgtggtcaattctgttgagcagatatcagcgttcaaatgatgtgttgtttggcacggttgtgtcgggacgtccggcagatttggctggtgttgacagaatggttggcttgttcatcaatgtcatcccaagaagaattcagctgacagatgacatgacattccgttctcttctatcagagactcagcagcagtctcttgcagccgagccgcaccaatatattccgatttatgatattcaggcaaagacaggtcagcagccactcattgatcatattgtcgtgtttgaaaacgtcccagccgcaaagaaggacgagcaagaggcgcgattagggtttactgtggaaaacatgaatgtgtatgaaaaatcgaactatgatctcaatttgctggcatcaccaggagaacaattgcaattgaagctggcctttaaccaaaaagcatttgatcctcaatttgtccaccggttaaaggagcagctgagtctattgatgagcgaggcgatcaagcatcctgatcaatcggttcatacacttacactcgtcacgaaacaggaaaagcaactgattcttgaggaatggaatgcgcctgagcttgagcatgaccagctgtatttgtcgaaatggtttgagcataatgtccgcaaacagccgaatgcagtggcattatcagcaggtgagcacacgatgacatatgcggagctgaatgaacaagccaatcgattggcaaggcatttgcaaaaaaatggggtcacgcatcaaacggtcatcgccattttagccgaccgcacgcctaaacttattgtcagcctgctggctgtcttaaaagcaggcgcaatctatgtgccaattgatcccgattatccagaaagccgcattcaatacatgcttaaagacagcggggcaacgcatcttctgactcactcatcctttatcggtcaggcgaaggcacttgcgtttgatggtacgtatctgtttgcggatgatcaggaaatttcactgatgagctcagagaatcttctgctagaagcaggcttacacgatacggcttacatcatgtatacatctggtacaacaggtcagccaaaaggcatcatgacgacccattccaatattgcccgggtggtcaaaaatacgaactacttaaccatttcagaaacagatacactgctgtcactatccaacagcgtatttgatggctttacatttgatgtatatggcgcacttttaaacggagcaaagcttgtcttgtcgaaaaaagagaccattttaaacatgggcgagctgacggggttgattaaaagggaaaacatttctgtcatgtttgttccgacggcattatttaatctcctcgttgatgaagaaaccgactggatgcgcagtgtgcgcaaggtgctgttcggaggagagcgggcatcggtacagcatgtgaggaaagcctttgatgtcatggggaaagacagactgatcaatgtctacggtccaaccgaatcaacggtcttcgccacctattatccagtagatgaggctctgccggtagagacgcgttcgattccaatcggaaagccgctcaaccagacgggtgcttatatattgagcccgcacggacagcttcagccgattggaatggtcggagaactatgcctgagcggaaaagggcttgcgaaggggtatttgaatcgtcctgatctgacaaaacaagcctttatcgcccatccatttgctgcgggagaaaggctgtatcgtacgggagacttggcctattttcgagcagacggtttgattgagtatgcaggcagagtggatgaccaggtgaaaattcgcggtcatcgaattgagctgacagaaattgaagcccaccttctcatgcatccaggcgtaaagcaagctgcccttatagctgatcagcataacacgcagcatacaaggctgctcgcctatatgacgtgtgaggaggagtggaaggacaaactcgatgtgatcaagtcagggctgaaggaaaaacttccggcttacatgcagcctcatgagctgatcagacttgagaaaatgccgcttacgccaaatggaaaggttgataaacgtcagctgccaaagccagaggcgcctcaaggaaaccgccatgtgaagcttccagtaaatgaggtagaacaaaagttgcttgtgatgtggagggaagtgcttgaaagagatgatatcagcacagatgaccatttctttgagcttggcgggcattcattaaaagcgatgtcgcttttatccaaggtgtcgaaggaattcgatgttcaggtgcccattcatttgctgtttgagacgcctaccattgaagcaatcagccgttatattcaacagcaggatcaggaagccgcaggctatcttgtattcaatgaatctcaaacgccaacagtctttgccctcccgccattaccaggctatggctttatttatcaggaagccgcaaaaacgcttgatggtgttcgtttgatcgcctttgactttattgaagccgatcatcgaatttcgcaatatgttcagcatatccagcaccttcagcctgaaggaccgctgactttgatgggatactctggcgggtgctacctagcctttgagcttgttcaatcgctcgaacaagcagggcggaccgtcgaaaaggtcatcatgatcgattcctataagaaaataggagaaagtgatttagaaggacgatccattgatgacgatatagcagcgatcgtccatcagtcgcagcaaagtgaacttgcccaagcggagctcatccaagacgcgctggctcaaaaaacgaaagcctactatgaaacttttgttaagggggtgaaccaaggagagatacaagcagacattgacttcatccaatccgaagagcaaattgcgataccagactggatggaaaattgggaagctgcgacgaccggcgcttatcgacaatatcaaggctatggtcagcacgctgacatgttcaaaaacaaagaatgtgccgctcaaaatgcacagctgatccaaaagatagtccatcataaaaatagagaagcagtcttgtaaactttagattaggcaggggtgcacactggcagccctgcctgacaaaaaaggaaaggaactcatatgaaaccatcaaccatcaatcaatcgaatgtacatgaatcaatggatacgattttacaagatgtacagaaaaccattttacaaaccaacgaaatcgaacgcttcgctgttttttctcgtgaaaaaaccattcgacctcggccatatcacctctctcatttatttctcgaccatcacatggagcaggaggccgcagttgaatggatacagacgcaaatggcttcgcctattttagcggacatgcccccagccatttcctatgggggggatatagatgttagtgcaggagctcaaaccttgcaggacgctctaactgaggcagccaaaacgacaaacgggctgacttatatcatcaatagtgaaaatgaactcacgcaatcctacgcacagttaaaggaggatgccgaacgggttctgacgggtttaagggcactagggcttgagccaggtgatcctgtcttctttcaattttcatcgaatcatgcgatggtcacggccttttgggcatgtgtgttaggcggatttgtcccaacacttgtatcggcagccccgacctatcgggaaatgaatgcctcagtgaagaagcttcatcacgcttggaacctgctggaacacccgctcattctcacggatgactcgctgattgatgaggtgcaaggcttagctttactgtggcatacagatcaattacgtgtggcagccgttgaaccgatgctcactttagaaagagatctagaagcacatccagtcacgcctgatgattcagtcttttttatcttaacgtctggaagtacggggatgcctaaatgcgtagagcattctcatagaagtgtgctggcgaatgtcaaagggacagtggcagccaatcagtttacacaagaggatgtctcgttagactggatgccattagatcatattggcggcattgtgatgttccaccttgtcaatgtgtacacaggctgtgaacagattcgggcaaggacagatgacttcatcgctcagccgctgcgctggcttgactggatggaacgctatcgtgcaacgaagacgtgggcacctaacttcgcatttgcgatgatcaatgattatgagaaagacatttcttcaggatcatgggatctttctgccatgacgtgcatgatcaatggggcagaagcggtcgtaccgaagacgattcaccgatttttacacctgctcgctccgcacggcttaaagggagacgtcatcagaccggctttcggcatgtctgaaatctcatcagccgttgtcttctcttttgcgattgagcggggagatgaaaacagcggggttctgacctttgaggaaacgtcgctgacagagcagctaagaccagcggaggcacgtgagacaggaaccgtcagctttacagagctggggaaaccgattccgggtatcacgattcgtatcgtcaaccatcagcatgagcttcttcccgaagatcatattggcagcgtgcaaatcaaagggccgacgacaatgaagggctattacaagaatgacgaagcgaatcaagaggtttttcaaacagagggctggtttcacacgggtgatttaggttttctgcacgaaggaaggctgacattaaccggtagagaaaaagacatgatcatcatcaacgggaaaaattatcacaactatgagattgaagccatggcagaggaagtaccaggcgtagaaacgagctttgtggctgcttgctccgttcggatggaggcatctgcatccgatgaactgattctcttttttacaccgaagctgtatgagcctgcttatatcatgagggctagccagcacattaaaacccatattgcgacaaaaatgggtctgtctgcatcaaaggttatccctgtccagaagcatgcctttccgaaaacaagctctggaaaaatagaaagggcacagctcaagacaaggtggcaggaaggtgaattcgacgaaatcatcaaggaactggacatcagacttgaaaatgaacacaccttgcctgattggagttatcaaaagaagtggacacctgctccgcttcatgaaactgaaaagcaaacagcaggggacatggtgatctttgcagatgcattagggctggcagatcaattgagatccctctcaaacaatgaacaaacctatattacggttgaaccgggtcaagcattcacacaactcacacatactcacttcatcatccacccgaatcggccgtcagactacgaacaactctttgagacgctccgttcgtatggcgtttcggtgaaacaaatcattcacctttggaactacacaaacaaggaagacacacttcaagcgggaatggcgaaggaagcgcagaaaactggcagcatgagtgcattatatgtaacaaaagcgattgccgcctatgaggaacctgtagagatcacctttgtctcagctcatgcgatgaatttgccagaagatcaaacgcatcatgtggaaaaagcaacgacaacaggattgatgacagctgtacagcatgaatggccgtttatcaaggtgcgatgtcttgatttttctctaacagaaccggctgaccgttctcatgcatcagcgatcatgacagagcttacacatgacacaagccatcatatcgctgcttaccgcgaaggtgttcgttatattcctcttttatcaccgctgcatctggaaaaagatcaaaagaggaagaaaccgccatttgaatcatctgggctttacgtgatgacaggagggcttggcggcattgggcggatgctgagtgaacaccttctgacgtcctatcaagcgcatcttgtgctgcttggaagaaaagcacgaaaggctttatctgcggagcagcaagacgttttgacctcacttgagaaacaagcgaaagaccatggcggcacagttttttatgaagaagtggacatgacggacgcaaaagacattgaagcgctcatctcaagacaagaggcggctcaaggaaaaaggctgcatggcgtgattcatttcgctggcatcattcaagaggagctgcttgctgacatgacgtctgcgtccttacatgcgatgtacgaagcgaaggtatatggcacgattgcgcttcatgaagcggcttctaaacggcagaacgtcttatttctatctagctcgtctgcacgaacgttaaagggcgggatgaccgtcggcgcttattgcgctgccaatgagttcgttgaacaatttgctcattatcaaaggctgacatctacagtgaagccgtattgctttagctttagcatgtgggatgaggtcggcatgagcgagggttcgatgatcaaaggcatgttaaaagaaagaggctatcttccgattccaaagcgggcgggcattcagacgatgctggcatgtttaatgacagatgcgccactcatttatatgggattagatcggtcgaagcaggacattcaagaaatgagccaagcggagaggcaaacagagcaagccatgtatgtcttttttaaaaccgacaaaacaaaggccattgaagaacggctgtatcagtccatttatacgtgtttgcagtctcatctatctggtgaatattccgtgcatctatttcctgaggaatactggaaagaatcagaggatggcatgccggatgaagcttatttcaaagcattcattgaggaaagtggacaggatgcagaggacagagcgcctcaaacggagacggagaaacttttggcaaacatttggtccgagctgcttgatgtctcaaatgtcagctgcggtgatcatttctttctactcgggggtcattcgctcaaggcaacgcaaatgctgtctgcggtgagacaaagaatgggatttgacgtgccgctcgctgttctttttgagcatacgagacttggggaattagcggaatggatcgattcgcatgcaaaagtggatgaagcggttccgatgcggaaaatggaaaagggtcaggagattccgatgtcttatgcccagcaaagacagtggtttctctatcaattacagcccgatctgccattttataataatacaatttcctttcggatgaatggacctttagatgtgaaggtgcttcagaggagtctgcagcaaatggtgcaaaggcatgaatcgctcagaacttcctttaccatgagcggcgatgaaccagtgcagatcatacatgagcatatgactcttccagagcttgaagtggtggatctatcagatctgacagcacagaaagaaaaagaacaaaaagcggctgaatgggcaaaaagaaaggcgggcacacctttccgcttagaacatgatccgctctttcgagtgaaactgattcggctgtcggaaacagatcatttgctgctgatgtccattcaccacattgtgtcagatggctggtcggttgggattgccgcaagagagctgtctgagtggtatacagcgatgattgacaagagagcgcctgatctttcgccgctgccgattcaatatgcggattacgcactatggcagaaggagtatttgactggagagacgctgcataagcagctttcctattggaaggagcaatttgcggttcctgtagaagatttggttttgccgtatgactacccgcggccagccgttcaatcctacaagggaaaaacgaaaaaataccacttgtcgaagtcgctatctgagcagctggctgccctttctaaaaagacagacagcaccctttatatgacgttactgactgccttttctaccttgctgcatcgattgtcttcacaggatgagtttgtgattggatcagtcattgctgggagaaatcggacggagatggagcatctcatcggatttttcgtaaatacgctggcacttcggatcgatcatagcgggaatcctgctttcactgaactattagagcgggtgaaagaaacaacaatgggcgcctatgcgcatcaggatgtgccgtttgagatggtcgtagatgagctgaatattgtacgtgaggctggcaagcagccgctgtttcaggtcatgttcgttctgcaaaacctgccgcttgaagcttctccgatgggggaggcgacatccgttttagccattgaagataacgataccgccaaatttgatctatccctgtttgtttttgaaggggcggagggtcttcaattaaaactggagtatgatgtggacttattttctgacgacacgatggatcggttccttcggtactacgagcatctgcttgcgtgtatttgtgaaaatccagcacagccgatcagacaaatgaattacctgccagagaaagaaaagcatcagctgctctatgaatggagcggtaaaaccaatcagcctgcaggcccgcttctcatcacggaacggtttgaagcgcaggtgagaaagtcacccgatgcgattgctctcgaattcggggaagagcagtggacgtatcgtgtgttacaagagaaagtcgatcggcttgctgcttctctgcagcagcgaggtgtgacgccgcatgaaccagtagggctgctcatcgacaggtcgcctcaaatgattcttggggtgctggcgattgtgaaagcaggaggcgcctacgtgccaattgatcctgaatatccagatacacggattgattatatgctgagggatacaggtattaagctgttactaacaaaaaatgaatggctcaaaaaggtgtcaatcagtcaaaccgaactcatttgtcttgatgagggatatgaagagtttttatcagaagcagaactcatacctgctgccctaaaacctgatggactcgcttatatcaattacacgtcaggatcaactggacagccgaaaggggttttgatcccgcatcaagcagtcatccggcttgtttgtgaaacagattatgtcacccttgatgaacatacgcgtattttacaaatcgccagcttctcctttgatgcctttacgtatgaaatatggggagccctgctaaatgggggaaggctgatactgaccgatcgagatacgattttatcaatggatacgctggctgacacgctgacatcatacaagatcacaacaggatttctgacggtgccgctgttcaaccggttaacagaggaacatcctgaagccttatctggattcgatgcattattggttggtggtgatgcgctctcagctgctcatatccgcaaggcactgccgtatttacctgaagggcttttaaacggctatggaccaactgagaatacgacgttctcctgtgtgcatcacattcgctcattagacgaagggcaggcgacagttcctatcggtcagccaattgcttattcacaagcctatgtattagacgaccagctgcagccggttccgcagggtgttattggagagatctacgttggcggaacagggctggcactcggttaccttggagatgaagaaaaaacatcgcaatcatttatcccgcatcctttccaaaaaggagcgcttttatataaaacaggcgatatgggccgctggctcccaaatggcatcatcgactgcattggaagaatggatcatcaagtgaaaatacgcggacatcgcgtcgaatgcggcgaaattgaagccgctatgctgagtgttgaagacatcatagaatgtgcggtcattccgcttcagcacgagagtggtcataagcgcctcatcggttactttgtccaaaaaggtgcatggacccagcaagacattcgcggcgccttgaaagacatgctgccagattatatggtaccaagtctattcatagagctagaggaactgccgctcacgccaaacggcaaggtagaccaaaagcgtctcccgccgccagagtggagacaggaagaagcagacaaaccagcagataaggcactcagtgaggaagaacgagtgctggaaaaagtgtggactcagcttcttggcactccttcaattgatgtacatgataactactttgaactaggcggagattccattattgtcatacaaatggtggcacgcctagcacaggaaggctacatcattcagccaagagatgtatttgaaaaacagaccatttcacagctggcacgcgctatgaaaagagcggatgtgtctgtgtcctatgatcaatcgcctgttacaggagaagttcgtctgcttccaatccaatcttggttccttgagcaatcgatgacaaatcaagattattggaatctatcagcgcatattgaattcaagctatccgtacaagccgaacagttgtcacaggttctctcaaagcttgtcgaccatcacgatatgctgagagccatttatacaaaagcagcagacggcacatggattcaaaccattcgtgcgcctggcatcatcccttgtgtcacattttttgatttgacggatgtttctcacgaggaagcgctggagcaaattcgcttggagacaagcgcttgtcaaggaacattgtcattagagcggggagaagtgatcaaagccattctttttcagacaagtgatcgtacgtctgaactctttatcgcagcccaccatcttgtgatggatggaatatcgtggcgcatcatacaggaagatttattaaatggattgaagcagcttgcggcacggcaggagatcgcgcttgcaaagaaaaccgcttcctatcagcagtgggcagatgcactctatgaatatgcacaaaccgatcaattacaagagcaggttcctttttggcaaaagatcatggatcaagaggaagaaggttctccttttcaaacacctgcgcttttcaatatagaagaacatgcagagatcctgactgttcaattgacgaaggatcaaacagacattttactaaggcacgcatcacaagcgtaccgaactgaggtcaacgatttacttttatcaggacttgcgcaagctgttggaaagccaatattgatcacgttagaagggcacggacgcgaggatttatttgaacagatggatttgtcacggacagtcggctggtttacaagctcttatcctatttttattccttttattcaaaccgatgtggagagacaaatcaaagatgtcaaagaaaccttaagagctgtgccgcaaaaggggatcggctatggcttgcttcaatacatgacagcatctcgcttactcaaaacggcagcgccgcagatgagctttaattaccttggacagttagatcaaatagatggtgaggcaaatctgtatttagcagatgaacgaaatggacatgtacatgatccaaaagcagaaagacagcatttaatcgatgtgtacggatacgttgtcagtggtcagcttcagatgaattttatgatcaatcgtgaactgcttcagcatgaagaggtgcgtcatttacctgaacggttcaaagaaaaaatggaggacattctgacgcattgtgtagagacaaaaggcggctttacgccatctgattttccaatggtccagctgacgcaaaagcaaatagatgagcttccagatcatgtggtggatgtgtatccactatctccgatgcagcaagggatgctgtttcatgcactgttagatcaagcgtcacaggcttattttggtcaggtgcatatgacgctcgaaggcttaacggacggcgaagcctatgaaaaagcatggaatctgcttgtagaacgtcattcgattttgcggacaagatttgcttgggaggggctaaaggagcctgtccaattgattcaatcagaaggaagcattcacctcactcagcacgatgtgcgccacctgagtgaaacggatcagaagaagaccattgagcgttatttacaatccgatcgttcaaaggatttcgaattagaggatgcggctgaaccgctcattcgtatcgctttattccatcgtgacgagaaaacatgcacgtttgtttttagctttcatcatattttaatcgatggctggagcctgttcggcttgattgaggaatccttttcaatgtatcgctctcttgtggatgaacgagagataaatcttcctgttgtacgtccgtataaagattttatcgaatggctgcaaaagcaggatcaagagagggcgcaagagttctggaaacattatatgtcaggagtggaggaagccacaccacttcctggggacggagagcagacttcgaatgaaggagcaggtattgatcaatttagtatcaaactgacgcctgaaatgcagcagaagctggagaggatgacaggcacacagaaggtcacgatgagcacactgattcaggcggcatgggggctgctcttgcaccttcattcaggctcagaggatgtcgtgttcggtgtcacagtatctgggcggccggcggacttaccagaggttgaaagcatgacagggctctttattaacaccttgccgctccgtttgccgatcacaccagacaggaccattgccgagctgctggcacagacgcaggaaacggtttttcacatgcgagaatttgagtataccgtactgccagatattcagcagatgaccaaaatcccgaatggagaatcattgtttaacagcattgtcgtgtttgaaaactatccgattgaatctgtagagccgtatggtgtacggatattagacattgcaagtcatgaagaaacaaactatgacctgacccttgtggctgtcccaggagatacgctggagcttcgagtcacataccgcttcaatcaatatacagaaaaacaaatacaatcgctgatgcagcagctgatccacacacttgaagccatgacagaacaagtggagacaccactctctgatttcacgatggtgacaaatgaagaaaaagagcggatgatcaccgattggtcgaaaaacgcacaagtcagcgtgctgtacccagaccaagaagaggtctactcaggtgtgcacgatccttcctgtgagacggaaatatttgtgctaagcgaagagcatcagctcatgccggtaggattttctggagatatttttatcggcgcgaagaatatcaaagcactttgcggggagcttgccgattggatggagacgcataaaattccgcatccattcaaacatcaaacaggcgaatacctttatccgacaggggatgtcggcgtttggactgaaaaaaacaagattcagattttggattggatgtaggaggagaagaacgatgttagttagtagacgaaaaggacatgcagcaaatcatatcgtcagaatcaacggaaaacgaatcgatctgaaagcattagagcaagtcatgatgcttcattttccgctaaaggaatgtgtgttaatccctaagaaaaatcaagaaggcagcctctcgcttgtgctatttgcacaggcgaaggacccttcgctgacaagagaggacttgatgaaaggcccgcttcatccccatgaagtaccagccgctctcgtcttattgccttccttgccaagggcagaaagtggagccatcgatacagaagcactgctttcgatcgacatcattgatgaagagggtttaagaaagatagaagagcgtacgaaagccatagatggagtggaggaagcggccgctctcattgaaagtcagacagaaaaacaaatgccttatcacctagatgatctgtttcctaatcggcagcgtgcgcaagggaacatatcgatctcgaagaatgaagagggcgaaacaaagcaagcatccgctcatgaaaagccgccagcacttgtgtatggcggggatgtcatcaaaaaaccaggcacacctgtcacactgacagaggtgctgattcgatcagcctttatgtcacctgaccgcggggtgacctatatcaaagaaggcgggcgcacattgacccaaacctatcctgagttactcacaaacgcagaacgggttctgtctggtttaaggaaagcaggcctgacaaatggcgatcaagtgttatttcaattaaaagatcatcacgatttcatcaccgtgttttggggctgtattctcggtggcatcattccgactccagtctctgttccgcctgtttatgatgagatgaatcaaggagtgaacaagctcaagggcgtgtttcagctgcaaaatgaaccgtttattattacaaacgaagcaagtgctgaagacattgctgggctgcgtgagacatttgaggcaaaagacatgcctattttaacaatcgaaacattgctctcgtgtgaacctgatgaacagcattatgagccagagccggatgagcctgtgcttcagctgctctcttcaggaagtacgggtgtgccaaagtgtatccgtcacaaccatcaaagtattttatctagaatcatctcctttgagcagacaaatggctttacgcatgaggatgtgtcgcttaactggatgccgcttgatcatgtaggaggcattgtcatgtttcatgtgcatgacgtctaccttggctgccagcagattagtccatccatcgatcaatttatcgagcggccgatggtgtggctggattgggtagaaacatacggcgtcacaaggacatgggcaccgaattttgcttttgccatgatgaatgaatatgaggacgacattcgcaaggggagctggaatctctccacactgacttatattatgaatgcagccgaagcggttgttccaaaagtgacgcagcgcttcatgcatatcatgggtcagcacagattaagccgccatgcgatggtgccggcgtacggcatgtctgaaacatcctcagccattgttcaatcaaagaaattcatgcggcatgatgatcaggatggacagctgacgattgatcagacctcgttaacaggtgagatccaatacgtggagcaagatcatccgcacaaaatgacgtttacagaagtcggcgtacctattccgtctgtatgggttcggattgtagacgagcatcatcatgtgctgccagaagatcaggtcgggcgcttacaggtgaagagtccaacgattatgatgggctatgatcaaaatgaggaagccaatcaagaggtatttgcggaaaatggctggtttcacacaggggatttagggtttattcacgaagggcgtcttgttctgacaggccgggaaaaggacatcatcgtcatcaacggagccaactatttgaattacgaaattgaagcggttgtggaagaggtggacggggttgaagtcacctttgccgctgcgtacggcatttacaatcccgaatcaagcaacgacacgcttgccgtcttttttgtctcgcaaaaagattcgatagaggaacaaatcacgatgattcagcagattagagaggccatcatccgaaaaatcgggatagagcctgatcacatcattccggtgaaaaaagaccaatttccgaaaacagagagtgggaaaatccaacgtgcccagttaggtgcagcgctaaaagagggagtattccgtgacattgaaagggcactggatcttgcttctgaaaatgaacaaacactcccagattggtttttcaaacgcacttgggcaaaggagcatattggtccgtctcagccttctgctgatcatgtactcgttttcgaggatgaaaaagggctgtaccaatcgctttacgcacaattagaacaaagaaatcagtcctatgtttctgtgaaaaaagggcatgaatttttgcgtctgtccaaaggaatgtatcaaatgaacccgagaatcaagggggattatgtcaggctcgctgcagcacttgaagcagatgaattaaagaccgggcaggtgctccacctgtggaatgtgacagacaaagaagccatcgttgagcctgcgcagttcaaagaaatgcatgcgagttccaatcaatctattttgtacttgtatcaagcatggagacaagaaaacaaagagccgatccggcttgtcgtagtgacaaagggtggtcaatttgtaagccctgaagacgatcttcatgtggagaaaacgtcgctcgttggtttattaaaaaccatcccgcaagaatgggaaggagcagaggtgtcccatattgatattgaagcggagcatgtggaacaggatgcaaagcacattgctgaagagctgtcagcgattcatataaaagcggaggtgtcataccgaaacgggcacaggttcgtaccaaagctggaaaaagtcaatatgatgaaagcacctcaaacagaagggtttttagaatatgaaggtctttatttgctgactggaggtcttggcggtattggatttgagctgtctaagcagatgctccaatttggcctaaagctcgtattgattggaaggacatctctggaaggcagcttggaaaagaaagaggcgctctcacagctaaaagacttcggtgacgtcatctatgtacaagcggatgtgaccgatttagctgatgtcgagcgggcgatttacaaagcagaaaaacattttggtcaatcgatccgaggcgtgctgcatttagctggggctggcaatgtgtcagagcattttcagcatgcggataagtatgcattggctcatacgtcagaagaggatttcacaaaggagctgtcagggaaagcagacggagcgtttgtcctgcaggaagccttcaagcatgacccggcagtaccactcgtcttttttggatcggtgaatggcttttttggcggcacaacattcggggcatactctgcagccaacagctttttagatggacttgcgcacgctctcacctttcaagaaggaagacgggcgatctctttgaacttcagcatgtgggataatcttggtttgtctaagggacataccggcgcagcgctaaccgttcgcaagggatttcaattgattggaaagaagcaaggtctccattcattatgtctaggtgcccggctgaatgaagcgcatctatttatcggcctagacggagccaatccagaaatcgctgagtatcttcagccagcaccaataccgacttttgagaaaaagcttttttacacggttcagtctggcaaagaagtgcatcttgaagatatcgcaggcgtaacaaaaggtgactgggatattcagcaagtacaggaaataccgaaaaaacaagatggctctattgatcatgaagccctcaagctgaatcatcacaaaaatggacaaccccttgaaaaacaattgccagaaacgaaaacagagcaaattcttgctgccatatgggaggacattttagacgtagatcgtgtgtacaaagaggatcaattctttgaccttggcgggcattcattaaaggcgactcaaactatttctcggatcaatcatgaatgttcaatcaaggcgcctttaaaaatattatttgaaagtaagcatctggcccatctggcgcaaatggttgatgacatcaaaggggcaccggctgttcaggaagccaagattccaaagcttgaaaagcgaacaagctatgagctgtcacatgctcagaagcgcatttggttcttatccacattagaaaagagccatcattacaatatattaggtgcttggaagctgacaggacaactgcatattcaagcgttaacaaaagcgattggtctcttaacgaaacgtcatgaagcactgcgtgcaacatttaaatcgcttggcggcaagccagttcaactgatacgtgaagaccttccgccatccgtcacagttgcgaatttctcattatttaatgaaaaaacgagaacgagaagactcaagcagcttattcagcaagaggcaaaccgcgtctatgatttagaaagaggacctcttgcgcagtggacgattgtggatatgggcaatgaggaattttatcttctttgcgcgcagcaccacatcatttcagatgcatggtcgctcagcctgctcattcaggagttagaagtggcatatgacgggcttctttcagatgaatcgccgcagctcccggcgttggaaatcgaatggacagattatgttcattgggaaaatgagcaactaacgcatcatcaagcagaccaaacctattggctcgataccttacaaggtgaacttccagtgctagagctgccgtttgaccgccctcgtccgccggttcaaacatttaacggcgctacagagcaaatcgtcttggaagaaccgcttatccgccgtttgcaggctttgtccaagcagcagggcacaacgctgttcatgacgatgctgtcagcatactacgtcctgcttcacaagctgtccggacagacagatatcatcattggctcgccgatcgcagggcgagatgccaaacaatcagagaagctcgttgggatgtttgtgaatacacttgcgctgaggcaggatatctccacagcagatacgtttgctgatgtcatggaaaacgtgaaagagctgacgttaaaagcatttgagcatcagcgttatccatttgacaagcttgtcgatgatctttcgttggatagagatttaagtcgatcgcctattttccaagtggccatggggtatgtaacagattcgctcaatgtaaacctcaaagggctgacaagtgaacatgtgatggtccatcatacagtgtctaaatttgatctcaccctgcatgtatttgaacagggagatcagctgtcgatccatgtggaatacaatacagatttatttgatcaagagaccatccatcgttatatgaattattatcttcatctgctagatggtatgacggctcagcctgaacgtacattttctgactattgcttaatggacaaagcggaacaggccgccatgatcataggaaaaaaccaaacggctacatcatatccaaaacggacccttcaagagctgtttgaagaacaggtgcagcgtgatccgcaccgtattgccttgtcctatttggaagagcacatgacgtatcaagagttggatgagaaggcgacacagcttgctgcttacttgcagtctaaaggagttggaccaggttcactggtaccgatgctttttgatcgttcctttgacatgattgtctcggtgctaggtatcgtcaagtctggtgctgcgtatgttccgatgtcgcctgaatatccagatgcacgcatccgcctcatcgttcgcgatacgcaaagtgatgtgatcatcactcagtctcattttgcgagtcgtctagtaggctttacaggtacaaagattaacatggacaagccgttatcagaaacagatgcagtgtatcaaagagaacaatcgatcataggggaagcccagctggcctatgtcaactacacatcaggctcaacaggtacaccaaaaggcgtgatgctccctcatgcaggagttgtccgcctggttagagaaacaaactatattgaactaggtccagatgacaagatgcttcagctctcaaactatgcttttgatgcctttacatttgaattatggggaatgctgctgaatggcggtcagctgattctgatcccaaaatatgccgcactgaatatggatgaattatcacggttgatcaaaacgcatcaagtgacagccaactgtctgccaaccgcattattcaatcggctggtggagcacgatccaaaaagtgtagcaggctaccgcacattacttgttggcggagaagcgatgtctagtgagcatgcacgaaaggtactcccacatatggagggtgtgctcatcaatgcttacggtccaacagaaaacacgaccttagcaacaacacatcaagtcacgcacatgccagagggtgcaagatcagttccaattggtgtcccggtatcgaactcaactgtcgtcatactagatgaagcgctcaacccagtgccagcaggcgtcaaaggagaaatctatatcggcggcacagggctggcaaaaggataccttcatgatccagagcgaacgcaggagcgttttattgacaatccatttcctgaattagagggagacaagctgtatcgttcaggtgatcttggtacatggcgttcagatggcaccattgaatatctcggccgaaaagacaacctcgtaaaaattagaggctaccggattgaatgtggggaaattgaaacagctctcctcaagcatccgcaagtaaaggaatgtacagtcatcgccaaaacgtatggcagctctaaacggctggcagcctaccttgtcacagacggggagaatcctgttccgggctggaaagcatttttgcaggaaagcctgccaggctacatgattccaagttactttattgtaatggacgaaatgccagtcacaacgaacggaaaggttgatcaaaaagcactgccagagccgacagaaacgatctctctttcccagggtgatgacaaaccaatcaccgaaacgcagcagcggattgtcacagctttcaaggaagtgcttggtgtcaaacaagtaagcatgcatgactccttctttgatttaggcggcgattcgattatgagtatccaggctgttgccaaattaaaagaaaaggggattcgtgttgatccaaaatggattttcatgcatccagcaccggctcagctagccgcacatgtagacgcaatgccagaggccggggagcatgtcgaaaggtctccgaaggactatgtgattgagctgaaaaaaggcgatccagctgaaccgagaatattctttgcaccgcctgccggtggaacggtcatgggctatatcgatgttgctaagctgatgacacatcaaggcgctgtttatgccatgcagtctcctggcttatatgaggatgaagaaccgcaattccttcattacacagagcttgtcaccatttttattgaagccattgagaccttctatcgaccaggcattgactatctagcagggcattcaatgggcgggcatcttgcctacggaatgaatcagcggctctgccatgcaggaaaagcgccgaaaggattgatcattttagatacggtgcccgtgctaagagatgaggcagatcaggcgctccatgccgatatgaacgaagaagaagtgaaaatgcttgcgcttgtccttggaatgggaaatctcgtcggcatccagccagaagcattacaagggctgagcttccaagaagtgaaacagacaatactcaaagaggcagaaaaggatgaagtggttcatcaatttatgaatgatcaatatttagataaatatttgcaaatgcaaacgcataatacgatcatgtcacaagccattgaattagaaaaagaaccattccctgtgccgttttatattgtacaaagcagtgatcacgccatcgatttccagaagaagttctcagactgggaggcttatacgaaaggaacgtgctcgtattatcacatcaaaggagaccatgtcaccatgatgaaaaggccgcaggcagatgaactggcacggattcttcaaacgattataaaggggtaaggacgtatgaatcagttatttaaaacctttgaaaaaaaatcagaccttattcagcttatttgttttccttttgcaggcggttattccgcctcgtaccgtccactttttgaacagctaaaaggctctgccgaagtaacagcagcagagcccccaggacatggaaccaatctcatgccgctcgaaacgagcattgaccaattggctgagctgtacaaagaagggcttacaggcaacctgaaccgcccatttatcctgttcggacattccatgggaggacttgtcgtgtatagactgacgcagctgctagaaaaggaaggggtctatccggcagcagttgtgatctcggccattcagccgccgcaaacaaaacggcagatcctgacccatttatccaatgaagcatttgttcagcatattgccgaaatgggcgggattccaaaggaattattagagaacaaaccaatgatggattactttacgccgtccttacgtgcagactatcaggcgctggaaaccttccagcacaaagatcaatccgtcatcgaaacaccggtttatttattcaatggaacacaagatgaaaaatgcatgcaagatgcaaatggctggctgccatgggcaaagaccatcaaacgcaccaatttcgatggaggccacatgtacatcaacacacacctcgagcacttcgcagaacagatgagacatgtgattgaccttgcagccaaacaacacttcatcagacattaaaaaaaagcggtcctcgtttgagagaccgcttttcttatgaattccgcttcttcactacattcccaccaatcactccgccaatgaccagcacacctccgatgagatgataccaatcgattgtttcatgtaaaatgagaaccccagcggcgaccgtaataaacgcagataaattgttaaagatgctgacctttgccgcttcaagctgagagagggcatagtttgataaatatgccgtgagaagtgaagaaagaatgcctaaaaagagcatcgaccatacaaaggatgcttgtgtaaatgggctgaaaaattgcggcattgtcccgttaaccgaatgccgaatgagcgcagcggcattgaagaagacaaacccaaagaatgtcatcacgaaggtgagttcaatcacatggaagcgccgtgtaatcacccgggcaaatacactatatgcactggaggataaggctgaaagcaatatcagcacatagccgatcatgtgtgaatgctttacatcaattcccttcatgacaaagagaagcatcaccccgcacacagaaagaagggtaaacagtacttgtatccatgtcgcgcgttcctttaaaaaccacgcggccagcaccatcgtcagaatgggaatcgttgcctgaataataccagcctctgacgaagaagtatacatcagcccccatacttgaaaagcaaaaaacaacacagggtaaagtaaggaaaacggtacgatgtagagaaggtcacgccattgaatggagaagcggttcttctttcgtaaaaatggatacagcaatagtgcggctgcaaaagaaatcgtaaagcggtgtgccaataaatcgatcgggtttgctgattctaatgcaattttgacaaacaaaaatgaaaaaccaataatcgtggcgtagcctatcgcggcagcatacgctttctgttttgaaatgttcacaacttgactccttacacgagcatgcatgcttcagttgaattgaccggttctgttcttctatcgtaatcggatcatctaaggtgtacaataagagaacatgatatctgtaccggtacaaggaggaagcggtgtgaggaaatatgatcagcttattctcagcttaaaagagaaaatggcgtctggtgaatacagtgctggcatgaagatcccttccattcgtcatttagtggctcaatatggagtgagtaaaagcactgtcatcaaagcactggacacattagaacgtgaacatctgctgtattctgtagaaagaagcggctattatgtcgtgaaaacgaagcagtcagcgggtaaacaggatagcacatggattgattttgcttcatctgcacctgatcccgttgtgtttccatatgtcgattttcagcactgcatcaaccaagcgattgatttgtatcaaaatgacttgtttatttatggcacagccaacggcttaccatcgctgctgccagtcatttctaagcgattaatggattatcaagtatttgcaaatccagaacagatcgtcatgacctctggtattcagctggcgttatccattttaagcaccatcccttttccgaatggaaaacagaccatactagtcgaacagcctggctatcacctatatctccaatatttagagaaaaatcaactgcctgtgcgggggattcagcggacggaaaagggaattgatcttcaggaattggagcgtatctttcgagaagaggagattcgttttttctatacgatgccaaggtttcaaaacccgcttggaacgagcttgtcaaaacaggagaaaagagcgattgcagcccttgctgagaaatatgatgtctatatcgttgaagatgattatatagccgatttagaattcgacgcaaaaagagacccgatctattcgtatgatcaggcgggtaaggtcatttatttaaaaagcttctccaaaatcatctttccaggacttcgaacaggagcagtcgttttacctgaggaactgattggaccttttagtgaacacaaacggctcattgacatcgacagctccatgctgtcacaggcagccttagaaatatatttaaaaagcgggatgtttgaacggcatcgagacagaatgcagacaacctatcgcaaccgatccaaacagctggtgacttgtctgaaaaatgatcaaatcgcttatcaactgggagaagaggagccagctacccatacacatcttcgtgtcgatcgatcaattccgatgaatcagctcattcagcagctgaaaaaggcatctgtttccattcagtcaatcggccgccactacctgtcgacccatcaaaaagaccccattcttcagctgaacatctggcatgtgaaagaagaccaaatcacacgtggagtcgaattgctaaagacagcacttcagcaaattgggcgatattaaagacgggacagtacatctttgcaagagagtatctcaacacgttcagccgcagaaggttttcgtgtgcacaccgccatttggtaggcaggatcgagtgagtatgtttgaacaaagcagggcgcttcatgatcaggtaatgtcaacgtcgcctgtccatcctctgacagacgggctgtaaaggacgaaagaccataagataatccctttccagtcagcttgataaaggcctccttcattgaccatagatgaaagaagtaggcttcctgccgttctgccggttgtgaaagtaaatcctcatactcatctgctgaaaaaaatcgtttagcaatcgctagatcaatcggtttgatctcctcaatatcaatacctacaggtgcatcatctattgcgcatacgacccaatcaccagagtgagaaagattaaagtgaaaagaaggaatgcgccggacgacaggcttgccattgccctctgttgcaaaaacgatttgatcaataggcagatcgtacatatcatggatcatttgacgaaccagcacctcacctaacagggtccttcttgcatcgaccaaaaaacgaaagcgctcagccgcagcacgctttgcaggtgatacaaagggtttcaggcaatcgatttgttgtcgtgcacctatttcatctaagtgtagtaattggatagcaaatatcttcataacgaacctcaattttttacattgattgtaacattggtgagcgccgtacaaaagggaaacagcctccttttcactgaaagcctaaaatgacagatgtaggcttatttcatcttatgaatataagaaaaatctgtttatttatttcagcacaagaaaagccattctttttgtagaatggcttgttcttatctgataagcgtttgaacaggtttctctgctgttttagtaataagcagctgcaggagccgtgtagactgcggcaaggagaaacgaaggacgatacctgtaaaaatagcagtcagaatcgtgccaatgccaatcggtccgccgagcatccatgcaaataaaagcactgttaactcaatgccatttcgaacccactgcacgttcaatcctgttttcgctgagatgagcagcattaatgaatctcttggcccggcgccaagattggctgagacataaatgccaacaccataccctgataccacaacgcctgtaataaacacatataaagcgggtaaatacccatgtggtgcaggcaataccgcattaaagaaatctataaacacgccaatcagcaccatgttcaataatgcgccgatctttggaaatgatttcgtaaaaacagaagtcagtgtcacgatcagtgcaccaataatgatggaccactgtccaatcgtgagtccaaagtgctgaaacagtccgtagtggaaagcgtcccaaggaccaatcccaagaatctttcctttcactgtcagcgataatccaaaagctagtacgatcaatccaacaaaataaaaaaaccaacgtaaaagatgttcccgcttcaaaagcattcccttctttcttaaacactcgaattcaatcgtaacatactcccacgcccctttaaatggctttgctcaattgtaatcgcttacttttaaaaatatgaaaaaaggctgctctcatcacgtgagaacagccttttttcatcatactggattcaaaatccggtttaagaattgttttgttcgttcttccttcggtcgtttgaagatttcttccggagggccttgttcgacgatgacgccgccatcaataaaaatcacttcgtctgccacttcttgggcaaacttgatttcatgtgtgacaactgccatggtccagccttctttcgctagatccttcatgacctttaagacttccccgacaagctcagggtcaagtgcagaggttggttcatcaaaaagcatgagctctggctgaatggcaagtgcacgggcgatcccgacacgctgcttttgaccgcctgagagctggaatggatacagatcctttttatcttcaagaccgaccttttgcaagagctggatggcttcttttcgaaccgtttcctttggacggcgctgtacttgaacaggaccttccatcacattttcaagcactgtgcggtgtggaaacaggtgataatcctgaaacaccattcctgattttcggcgaagcttcagcaggtcagctgatttattttttttcgaaaaatctatcgagaaatcatcgaaggtaaaggagccgccatttggtgtttcaagtgcatttaaacagcgaagcatcgttgtttttcctgaacctgatgggccaagaatggctacaacctgccctttgttgatcgtaaaatctattgactttaaaatctcattttcaccaaaggatttcttaagacctttgactgttagcatgtcgttccctccttaccttgcgacatatcgatcaagtcgtttttcaatttgatgctgaacgagagatagaatgaagcagaatacccaatagatcagggctgcttccatataaatgaacaatatctgatctaagttcgctgcagcaatttcctgagacttacggaaaagctctgccacgaggatttgagaggcaagagatgtatccttcaccaaactaatgaatgaattagatagcggcggaatcgatacacgcacagcctgcggtaaaatgacgcggacgagtgttttacgatgcgtcatcccgatcgaataaccagcttcccattgtccttttggaacagacaggacggatgcacgaataatttccgatgcatacgcacctacgtttaatgaaaaagcaataatggcacttggatatggatccagtgtgatattaaatgtcggaaagaaatagaaaataataaacaattgcacaaaaagcggcgttccgcgaacggccgacacatagatggagaaaatccatctgagggctttgattttagacattctagcaagagctgtcacaagcgcgataaaaataccaatgataaaggcaatgatggcgaggggaattgtataataaatcccctgcatcaccattggccaaaaagattgctgaagaagatcccaaggaatgacgactcccagggtattactttgtaacatcttcaccaaaccatttcttagaaatcttagcaagtgtaccgtcttttttcatttcttttaatgcgccattcactttgtcaacgacttcgccgctgccttttctgaatgcaaagtaagtttcttgaggatctcctgtttcaaatgcaacttttaggtttttgttcccgcttgttttcaagtaattcaatacagccagcttgtcattgaacgtcagatcagcacgtccttgctgaatcaattgaatcgattgtgcaaggccttcaacgccttcaattttagcaccagcatctgtagctagtttattgtaattacttgttaaagattgtgctgcttttttgccttttacatcagatagtttcttgatgtcgttgttatctgattttgtcacaacaatggcttgggacgttgtgtatttatcagagaactcatattgattttcacgtccagttttaccaacttggttcgctaccacgtcaaaacgttttgaattcagtccagcaaacatgctgtcccattgtgtttctttgaattcaggttttaagtcaagacgttttgctacttctgtgatgacttctacatcgtagccagttaatttatctgtctttttgtcatggaatgtgaaaggagcataagtaccctctgttccgatcgtcagaacacctttatcctgaatggatttccaaaggtcacctgattccttagacccagattgtttattcgcgttgtcgcttgcaccagatccacatgccgtgatcaatgcaacacaagcgcctaacataatggcaaagaacatttttttcattttattccccacttttcttgttggtatttacaacatatgatcttacagagaagcaacctaaaagtaaagcatttgaaactagcttgagcgaatctcaccaactttatgcccgcaacccatttctttcaaacctctaacgtctataaagcctatcatcttttatttgtgcgaacattactaaaataaagactttgagacagtgaccatagaaggaagaatatttattataaaagatgtataattagtaggttgttttgaaaatggaatgaatcacatggagacatgttttgataactgagcatcttagaagaaggagggcatcattgtggatgttggacaaaatcagcccgaacaactgaaaagggcgatgacctcccgccatttatttatgatttcacttggcggtgtcattgggacaggctttttcttaggaacgggctatacgattggacaagcagggccagttggagccgttctttcttatattgtgggcggattgattatgtatttaaccatgctgtgtcttggagagttgtcggtcgcacttcctgtgtcggggtcgtttcatacgtatgcgacgaaatttgtcagccctgcagcgggttttgctgtcggctggatttattggcttggctgggcggcaacggtcgccctagaattcttatcagcaggacagctgatgaggcgctggctcccgcaagtggatgtgtggatttggtgtctcatatttggaatgtgtcttttcttattaaatgcccggtcggcgaaagcgttcggggagtcggagtttttcttttcaaccattaagattattgcgattttactctttataggtgtaggcggagcggcgatgtttggttttattgaaacaacgagcggtgaacctgccccttacttcagtcattttgtgagtgatggtttgtttccaaatggattgctcgccgttgtggtcacgatgatcaccgtgaacttttcattccaaggaacagagctgatcgggattgcggcaggggaaagtgaaaaccctgaaaaaaccgttcctcgttcgattcatcagacggtttggcgtacactcgtctttttcgtcttatccatctttgtcttagcgggtatggtgccttggaaggaagcgagtgtgctgcaaagtccatttgttactgtatttgagagaacgggaattccttttgcggcagacatcatgaactttgtcattatcatcgctttattatctgttgccaactctggcttgtatgcatcgacgagaatgctgtattccttatcgaaggaaggaatggcaggaaaagcatttagacgcgtgaatcagcgcggtattccgatgaatgccttactgctcacattcctgtttacagggatttcgctattatccgggttctttgcagagaaaacagtatttgcctggatcgtgtccattgccggcatgagtgcccagactggctggatcaccattacattatcacagatgcttttccgcagaagatatcttaaagcaggcggaaagctggaaaacttaaaatttaaaacccctctctatccggttctgccaattattgcgattacactcaacacaatcgttttaatcagccttgcctttgataaggaacagcgcattgggttatatgtcggcgtccctctcatgatcattgggtatgtcgtctatcaccgctatgtgaaaaagcatcaggcgaaaagtgaaccgcttaagctgcaaatccatggagatgatgagatccggttttaaaccagaaaaagaagccaacccaatcgggaggcttcttttttcatttaatgaatgcctttcattgctttcttgatcactggtgttaagagcagcatcacaccgcataaaacgatggcaagcattccgatgataccgaaatagacggtttctggcactttatcaaacagtttgaccacttgcgcattgatcgcctgtgccatcgcatttgaaaggaaccaaaggctcatcgtttgcgctgagaaggcagcaggtgcaagctttgttgttgctgacagcccaactggtgataagcagagctctccgatcacgacaaggaagaagctcagaacgagccataatgggctcacaagtgtattcggaccagacatgtaggcaggaatgatcatgatgatgaaggataatcctgcaaacagaaggccaagtgagaacttaatcggggtagacggctgtttctttccaagtctaatccacaaccaagcaaacacaggagacagcagcacaataaagattgggttcaatgattggaaccacgaagaggcaagtgtcatccctaggaaattcaagtttgttcgttgatctgcatatgtggctaaaatgtttgagccttgttcttgaattgcccagaacatcaccgcagcaaggaacaatggaatataagcgagaaccctggattgctccactgagctcgtctttttactgaaatacatgacgatgaaatacacaatcggaatgagcacaccaagcacactgacaaaccaagtgaatagattaatcgtgagtgcgcctgtttgaatgccaatgacaacaaaaacagcgagcacaatgatgatcaatgttccgaaaattttgaagttcttgcgttcagcagctgataacggatttgtcacataagtgccggcaagaccaaggttcggttttttcgtgatcacaaatgtaataagtccaacaagcatcccaacggcagcaagtgagaatccgaggtggaagttcactttttgaccgagtgttccgacaattaatggggaaataaaaccacccatgttgatgcccatgtagaaaatactaaagccagaatccctgcgagggtccgttttggtatacaggtcgccaacaatgtttgaaacgttcggcttcaaaaggcccgtcccaataataatcagtcccatactaataaagagcgctgttgctccgcttggcaaagctaaaatgacatgtccaagcataatgaaaaccccgccataaaagaccgtactggacgaaccgaatactcgatcggcgagccatcctccaataatgcctgacatatagacaagcgcaccgtagacagacatgatcgaattggctgtcgtctgatcaaaaccaagaccgccttttgtcacctctgtgtacatataataaataagcagtgcacgcatgccgtaataagagaaacgctcccaaaattcagtgaaaaacagtgtgtaaagtcctttaggatgtccaaaaaaccctttttgaggaacacttttaacaattttatcgtggtcaattgtagacatggcatagatcctttcttaaaaaaagagatatgagaaaaatgatattcttgtatagttcttgtgtcaatataaaactattctaaaacaggaaaatgttagttcaataggcgtaaagactcaaaaaaatgaaacattctttcaagtgagaatggtcagaaagttatatcggaagaatttacttaaaatttgaagaattgtacaagcaaaccttttacacatgcataggatgacaagaggacttgtgtgaaaaggagggatttaggttgggggaattgaatgaatctgatctaaaaaaacctgttgtcaatgtacaagattttggtgtgattgcggatggggaaacggactgtacagcgaggctcaatgaatgcttagaatggacgaaagcacaggggtattcccacgtctggctgccgagcggcacgtatgtaatcgatgcagtgtacagaggtgatcgattttttcctttccgaggtgcaggcatacgggtgccaagtcatatgtacattgagatggcgccggatgccgtgattaaggtaaaaccaaatgattcgtgggggtatgcggccttttatataggaaaggttcagcatgtgaccatcaggggcgggcgaatcgaaggggatcgtcatgagcatgtgtacaagtcgcttccccctgaacgaaaaacccatgagtggggctttgggatatgtattgaaggggcctcccatgtggaagtgaatcgtgtgcaaatcaagaattgtacgggagacggcatcattgtcagtccccacggtttattatcacaagctgaatcgtactcgcctgcttcatctattcatatttctggctgccacatcacagattcaagacgaaacaatatctcgattacaggctgtgatggggtcattgtggaggactgtctgctggagagagcaggagtaaacggagtcgagccgagaatgggtattgatattgaaggctacggagaaaaagcagttaatatggaagaaccgctgaatattcaaattcgaaacaacattgtaagaggtggtgctgcaagttccatttataatttcaacggctatggtgtcatcattgaaggcaatcatacagacagcagtatctcctatggctttgccaccgaaacaatcattgccaacaatttgatccgtgcagtgggaggaggcgttacaaaagcaggaattacgagcttaggtgtctctcttggtcaaacggaaaacaatgtgatcattattggcaatatgattgagggatttgaaaaagggattgatgtgaggggcgacagcgttcacattacaggaaataagatcagtctatttgaagatgcggctgtgtccgtttatatggcgaatcgtattctaatagaaggaaatcatattgaatcggggacgaatacagggcaaagaagcgcagcgctgcgtatctatcaatcggatagcgtcgtcttttcaaacaatacaatctactcggtgatcgatggggcgatggtgagaggaacgaatatcctgatccagcacaatcaattcaaagatttcagcagagggatatgggtgcaggaaggggaaactggaatcaacggcaaccactttattcaagaaggacacccagagcttgcgtcttcgtatacgatcagtatcactgggagtgcaaaggctttcatctggcagaatcgctttaagcactaccaaaattacgccttatacagcagcacgacgggtccattagaaattaaagataattcctttgaagaaacatctttatatgtggtgatgtatattaaaaatggttcaccgcaaattggagataaccgcttttatttaaatcgttcgttcggacagccgacggcgatctttatcgatcaagccgcctcagcccgtgtgctgcggaataacatcattaatttatctcctcaaaaagcgattgccgtccgcactatatcttccactcattccgtgatcgcccataacatgctggaacgcagccaattggtcacacataccacagaccggctcatcggaaatattgaaatcgacacaccatgatgaacgggtgaaatcctaattttggaggttcagaaggcggttgacaatcctgtaaaaagggcatatagtaataattatttttcatttttcgcaacatttgccctttttttattgataaaaccgattaattcaatcagaaaaatgtatcttctgaggacttcagtttgatacagcaggatatagaaaggatgaagaacaagtgtcacagccgaaaaggaagctcaagctaggcgtattcatcgcaggaactggacatcatgttgcctcttggagacatccgaacgccgtatcagatgcagccatgaacctggattattttaaacaattagcgaaaaaagcagaggaaggaaagttggatttgctctttttagccgacagcttatccattaatcaaacctctcatccgaatgtactcacgagatttgaaccgctcaccctgctttcgtccattgctgagtctacttcatcaattggtttagcagcaacagcatccactacatacagtgagcctttccatattgcaagacagtttgcctcccttgaccatttatcaggcggaagagcggcatggaatgtggtcacatcttctattgaagaaacagcgaaaaactttagcggagaagagcatttagcacaccataaacggtatgagcgagcagaagaatttgtcgaggtcgtgaaaggtctttgggattcttgggaggaagacgcccttgtcagaaacaaggcaacgggagaattctttgaatctagtaagcttcatgagctccagcataaaggtgagttcttctcagtacggggtcctctcaacgtatcacgcacgcctcaagggcagccagtgatcattcaagcaggatcatccgaagatggtcaaaagcttgcagcgaaaacagctgagctcattttcactgcacaaaacgatctcgaaaaagcgaaggaattttatcaaagcttgaaggagaaagttgaggctgctggtcgtgctagagaggacgtcagcatcatgccgggtatcttcccgatcattgctgatacagaggaagaagccaaagcaaaatatgaagaattacaggagctgattgttcctgagattgggctgagcattctgcaaaattacttaggtgggattgatctgtctcagtatcctttagacggaccgcttccagagattgatccaagcacgtcaaatgcggtgaaaagccgctttgatcttgtgatgaatatggcgagaaaggataacctgaccattcgccagctctatcaatcggttgccggctctcgtggtcataatattttcattggaacaccagagcagctagcagatgtgatggaaacatggatcaatgaagaagcagcagacggctttaacgtcatgccgccgctcttgccagaagggctggatgtgttcgtagaccgcgtcgtcccgattcttcaggaacgtggcttattcaaaacagattacacaggacaaaccttacgagaaaatcttgggttaaagcagccaaaaaatcgctacacgacataagggtgaggtgactaacgttgggatacacgtttcgtctggcaacagaagcagatatagaggcgctgcttgaactgacaacaagagcctatgagccaattcgtgagctcggcatccagtttcaagcagcacatgctgatttcgctctcgttcagaaaaatgtacaaaagaatctttgctatgtgatggaagaaaacggagaacttctatctaccttgtcgctccgtatgccttggggagagcagccaggaccgttcggcgtccctcacatttggtggtttgcttcagagccttccgccaaaaaagggacaggctctgtcttgctggaatgggtggaaactgaagtgctaagggataccctgaaggtgccatacgtatctcttggtacagctgataagcatccgtggctcatggacatgtatgagcgcaaaggctacgtcagagcaggagaaaaggatttaggcaagggtcacatcacggtttattttaaaaaacaactaaggtcagatatgacacaattataagaagaaagaagggtttacgaacatgaaaaacaaaaagtggttagtcgttctatttgcagcaatgctggcagttttagcagcttgcggcggcaacaatcagagtgaaggcaaagacgaaaaagtgttaaaagtaggcgccacaggacaaagctatccgtttgcttataaagacaatggcaagcttgttggcttcgatgtcgaagtaactgaagccatcgcaaaaaaactcggctacaaactagactggcagttgagtgaattcagcggactgatgggacagctgacatctggtaagctggatacagtgtcaaaccaagtcgcagtcacaaatgagcgtaaacaaacgtttaactttacagatacgtacgcttacgcaggaacacaaatcatcgtgaaaaaggacaacaacgacatcaaaggtcttgatgatttaaaaggaaaaacagtagcggcggttcttggctctaaccacgccaaaaacctagagagcaaagacccggacaaaaaaatcaatattaaaacatatgaaacgcaagacggtgtattaaatgaagtggcaaatggccgagtagatgcttatgtcaacggacgcagtgtattacttgctcaaattgaaaaaacaggtctgcctctcaaaatcgttggcaacccaattgtgtatgaagaagtaggctacccatttgccaaagataaaaagcatgacaagctaagagaagaatttaacaaagcgattaaagaattaagagaagacgggacactgaagaaattgtctgagaagtatttcaaagacgatgtcacggtgccaattaaaaaataacgacagcggcggtgaagagcagacatgaacaaaattgattggcagtatatggtgacggtttttccgacattgattcaatacttgccgataacgatcttcatggcgattgtctccatggtatttgccattatcattggtgtggtattcgctctcattacgaaaaaccggatacctgttttataccaatttgccaagctgtatatttcttttttcagagcggttccaaccttggttcagctctttctcatttattttggtcttccgcagctattccctgcgatgacctcaatggatgccctaacagcggtcattatcggattaagtattaaaaactcagcatacttagcagaaattttcagagcggccctcaattctgtagatgaagggcagctagaggcatgtctatctgtcggcatgacaagatggcagtcttacgtcagaattattttcccgcaggcagtcagaaatgcgattccagcgacggggaatacctttatcggtcttttaaaagaaacatctcttgcctttaccattggggtggcagaaatgtttgcacaagggaagatgattgcgtccgcgaactataaatactttgaaacctatttagccgtagggattgtgtattggattatgaccatcatttatagcttccttcaagacctatttgaaagaaaactcagcaaaccttaccggaattaaggaggtgtggacatgatcaagctcaccaatttgaagaaatcattcggcgatcttgtcgtcttagacggaatcaatctcgatgtgcaaaaagggcaggttgtggccattatcggaccttctggctccggtaaatccaccttgctgcgctgcttaaatttattagaaataccagatgaaggcatgattgaaattggcgatgcgaagctcgatgcgtccaagtatacacgtaaagaagcccatcatctgcgtcaacaaacggccatggtgtttcaaaactataatctatttaaaaacaagacagcactgcaaaacatcacagaatcactgcttgtgacgaaaaaaatgacgaagcagcaagcaaatgagattgggatgaagctgctgaagcaggtaggattagagcaaaaggctgacagttatccagtcacgttatctggcggacagcagcagcgaatcgggattgcccgcgcattagcggttgatccacatgcgattttactcgatgaaccaacgtcagctcttgatccagagcttgtctcaggtgtgcttcaagtgattaaatccattgcaatccaagaaacaacgatgatcatcgtcacacatgaaatggcgtttgcaagagaagtggcagaccatgtgattttcatggcggatggtcatattattgaacagggcacaccaactgagctatttgatgaaacgaagaatgaacggacaaaacgatttatccaaaaagaagcagcggctgaagaagcataagctgctttttactctttagaggggtgagtatcagtgaaatcaataggaaatgaagctttaaacaaacgtttaattaacattcgccgagcacttcatgagcatccagagctggcgtttgaagaatatgaaacgacaaagaaactgcgcggctggttagaagaagaagggatcaccgtactcgattttccagctcttcaaacaggtgttgtctgtgaaatcaaaggagaacaagagggaccaacgattgccctgagggctgatattgatgcacttccaattgaagaagcatcaggcgaaccattttcctcaaagataccggggaaaatgcatgcttgcggtcatgatttccatacagcttctatctttggagcggctcttttattaaaagagcggaaacacgagatggaaggaacggtccgcattttgttccagccgtctgaggaagtcgcccaaggagcgaaacatgtcatagaggcaggcgtattagatggagtggatgcgatttttggtatgcacaacaaacctgatctgccagtaggcaccattggtattagagaaaaagcattaatggcaagtgttgaccggtttgaaatcgatattaaagggacgggtggccatgcaggtattccgaatcacacggtggacccgattgccatcagcgggcagatcacaagtgctcttcagcaaatcgtcagccgccgcatcagctccttacatcatgcagtagtcagtatcacacgcattcaaggcggtacatcatggaatgtgattcctgatcgtgttgagatggaaggaaccgttcggacgtttgagcctgaagtgagagcgatgattccagagcttatgaaacaaatcgtgagtgggattgccgaaggatttggggcaaaaggcgaagtgaaatggcatccgtatttgccttctgtgttgaatgacgagcgtttgacaaaggtggtcgaagaaacggcagatgcgctggatctcacagtagttcaggcagagcagtcaccgggcggagaagattttgccctttatcaagaacacattccaggctttttcgtatggatggggacaagcggtaccgaggaatggcatcaccctgcctttacattaaatgaagaagcactccctgttgccgctgccttcttttccgagcttgccgttcgggcattggagtcacgatcatggaactaacaaaacaactggcagaggctgtgcttgcagctgatccgcttcaagatcagcggtccgttgaaatggctcgaaatggtctgttagacgttgcggcagcagcgcttgctgcgagagaggatgaaggtatacagaagctaatggcgcttgtggaacaagaaggcggagccgctcaaattcctgtcattggacaagggaagaaggtcagccgtcaagccgcagccatgctgaacggctatctgattcatgcccttgattatgatgatgtgcattcagacgtgagaggacacccaagtgcggtgatcattccagcattgctatcacagctatcagacggcaaagggtttggcgatcgatttttagctgcctacatcacaggtgttgaagtgatggcaaggcttggcgaatccatcggcaaggcgcattatgagcggggctggcataatactggaaccctcggagccattgcagcagtatgtgccattgggtatttaaaacaagtctcgcaggaagagctggcgaaggcaatcggctttgccggagcgcaatcagccggaatgagaaagcagtttggctctgatatgaaaccattacaagccggcttagcggctaaaacagccgtctggtctatggacttagcttgttcaggttttggcgggaatgaatcggttcttgatggtacgcttggtttcttttctctctatggagatcaggagcgcgcggaaagtcgtttactagagggatatggtacaacgtggcgtattgtctcgccggggctgtggttcaaagtatacccgttctgctcagcagcgcatcatgcagcagatgcgattctgtccttaatggaagagcatactttcttttcggatcaggtgaaacaagtagaggtcatattcccgcctggcggagatgcagcgcttattgagcggacacctttgacgggcgaagaaggacgattcagtgtcgaatatgtcatcgcacttgccgtatttggacagacgcttacgctggatgcctttacgaaaaaaaacattccatcagacatgcgcacatggatgaagcgggtgagcagagaatatgatcaaacgacagaaccccatccagaggctgtcccaaaaggtcgctttacgattgtgaagcttaccttatctgatggtaccatcattagcaaacgagtcgatcttccgcggggcgcaccaggccatgcactatcgaaagaagacatcatgcaaaaattaaacagtatcacagacacatcgcatgcacagcagattttacaagttattgaagacggaaacgattcttcttatttgcagctgctggcatgatttaaaaagaagaaaagggctaaaatttatttagccctttttgtgtatcatttcttattccattttagtaaacgtcaagccaatatgagcaagtgcctgcggcaagtctttccggatggtgatgtctttaaatgaaatattcgactgaatcgcacttagagcaagatcttgtttaatccctgttaaaacagccgaaattcctaaaagtctcagcgtttgtgcatagctgaccagatattgaatgctctgttcattcaggcgttttgttcccgatacatcaatgaccaaatgagagagcgacagtctgtaactttcctgtaaaatggtttctaaaatatgctgagcacgtgtctcttcgatatcacctaggagaggaagcacggcgacaccgtcaacaactgggacgatcggtacagataattgctgaatctgccggttggcacggtctagttccaggacgtagcttaatagagaagccatcgtttcaaacatatgcacatgctcttctgtgaattgctgcggccttagatcaagcccgcaaatcgttccgtagtttgtgccatctgtaaaattaatcggcactccgatgaatgatccgccttgaagacgtttcgtgacttctaagtatttagaacgatcatccaatgatatatcaggaatcacaagcgtatcctgatgatcgaccgccagcttgcaaaacgtcttctcgtaaggaatttcttctccttcttcaagaagctgctcgtcatgatttagcaccttgacaatctgattggtggtttgatcgtttttagcaataaacagtgtattcacatcagtgaattgactcatcatgtttaaaatactcgtagaagcatcatgaaaattgcgaaactgttttaatagttgttgacgaggcattgttttaggactccttgtagctccgatcatagaccggaacaatagttgatttgtctctatcatacaaaatgaaacgagaaatagatatattttaatgcgcaaatccatgtgaatcgggcgagaacaaaaaggactgccgatcctgagatctggcagtctgctggttaaagggagacagggacggtagacatagagaaaaattcttcatacaacgcttgaacggcttctttttcttgagccgctttgacgccaaacatcatgctgacctctgaagagccttgattgatcatttcaatattgaccttcgcttttgacagcgcctctgctgctcttgctgtggtgccaacattgtgacgcatcgcttctcctacaaccataatgagtgagagattcggctctaaaacgacctcatctgcatcaagcacaagcttcaagcggtcgagcagctcttgttcaatatgctgctcctccagctgatcctgtcttaaaataatgttcatatcgtcaatgccagaaggaacgtgctcatacgtaagcccatattcctctaacgtttgcagcaccttacgtccaaaaccgacttctctgttcatcaaatacttgctaatataaatgctgcaaaaaccgctgtctgaggcgattccgacaactggtccatttgtatgatctcgctggttcacaatttttgtgccttttgctgagggattattggtgtttttaatttgcacaggaatgcctgcacggaaggctggaatgagtgcttcatcgtggaacacagaaaaaccagcataggatagctcgcgcatttcccggtacgtcagctctgtaatttccttcggctcatgaacgatcgtcggattgacagcgtagacagcatccacatctgtaaagttttcatacacatctgctttcaaaccgtttgccaaaatggaaccggtaatatcggagccgctgcgagaaaaggtgacgatgtcccccgatagactaaagccaaaaaagccagggaagatgatgatgccagagcgctctcttaatttgtacaaatgatcatatgactctggaaggacttgcgcttgaccaggctcatcgctcacaaataaaccagcttcctttgggttcacatagtgagcttcgacaccttgatagcggaaataggcggcaatgagttttgcgttattgtcttcaccgcttgctttgatggcatcaagatatcgctcagggtgagacgtatctgcctgtaagagggcatctagatcttgccgaatggtgtcaatcacgtcatgacttaacccgagttcatccgcaatcgaggcataccgttcgatgacggctttctgtaaatcctctgcttcccctaaacgtaaatattgcttaccacagctaattaatagatcggtgaccttcgtatccgttgaatgccgttttcctggtgcggaaacaacgactgcttttcgagctggatctgctgttacaatgtcaaataccttttgcagctgcttgccagatgcaagtgaactgccaccaaatttaacgaccttcaatgcatacatctcctatagtaaaaattttctcacaaattgaatagttcctattatcaactcttttcttcaaattatcaaggtttttcttcactgtaaatacaaatgtccttttggagaggacgatataacgtgaatatatgaaaaaagagccggccatatgccgagctctttttcttatgaagaagatgaggaggaagatagctcctgcttcatcactttattatcgcgtttttcctttaagaaaaaggagaggacgagtccaaggaccgcaatcaaaccagacacgataaacgacgtgttcatgccgtgaacggctgattttaatgggctggctaattctgcatttgcagcagagctgctcatgatggagacaagcacagccgtcccaatggagccgcccatttgtctcatcgtgttattcatcgctgtcccatgcgggatcaaatgaggcggtaaagagttaatacctgcggttgtcagcggcatcatgatcatcccaaccccgattaagcgaagcgtgtaggcgaccgtaatgagggcgatggatgaatcaagggtgagcagcataaatggcaaggtcgtaacggtaagtatcgtaaacccgcctaatgccagcccttttccaccgactttatcaaaaattcgtccaataattggtgagaggagccccataaagagagcaccaggcaataagatcagtcctgtatcaagagcagacaatcctctgacattttgcgtatagagtggcagaatcgtctctgtcccaatcaataaggcaaagacaagcatcccaaggaaggtcgtcaagctaaagatcgcaaacttaaagacaccaaattcaagcatcggtcttgtcaaattcgactggcgcagaataaagaagaacaagctcacggcgccgacaatgagcgaaatgaggacagtcgcactcgtccagccatatgtgccaacactagaaaatccgtaaagcagtccgccgaaaccgaaggacgacaagatgacagataaaacatcaattcgtgtctctctttgttgcgttacatttttcattaagaagaaagcaagaatgagatcaatgataccgattggcagtacaatatagaacaagaacttccagctgaaggaatcgacaatccagccgccaagtgtcggtccaagagctggtgcaaacgaaatgacaagtccgaccatacccattgcctgaccacgtttttctttcgggaaaatggttaaaaagatcgtttgcatcagcggcattaaaattcctgcgccggctgcctgcacaatacgcgctgcaagtaatacagggaaattcgttgcaaacgcggcaagaattgtaccggctgtaaagatgctaagcgccgttaaaactaaagaacggcttgaaaatttctcgattaagaaagccgtgatcgggatgagaatcccgtttgtcagcataaaggctgtggtgagccactgtcccttgctgacatcaatattgaattcctccatgatatgtgggatcgctggaatgagcagtgtttggtttaaaattgcgacgaatgccccaacgaggaaaatccccacaatcacagatcgattatacgatgttgttgattggttcatgttatcccttctttatctatagaatgatgcttttcagctgtgacacgttttgtgataaaacgctgtttttacctaaataatcgagcaatgagctgattaaaaaggttctcggttggtcctttgataattcttgactcagcagctcaaacgcagagaggagatcgtccttttcttctccgtttggcagtgcgtgaagctcttgtttgatcttcgttaaggacgagatgacaagcttttcttcatcatattcgtcctgtgaagaaagcaaataagagtccatcagctgatctgttaacacaggctcaatggaacaaggctttttcgacacacggtccatcacgccaataatcatttcggcggcattttctaattggatgttcttatgctcaatcgccagcattaagatgaattctctcattaatccgttgaggacgatcacaagatcccagacataaggagcgacagattcaccatatgtgcttaaaataatgtctctgtgccgctgcatgataatggagcgtgtctcgcgtaaatgtttaatgacaatgggcgaatgctgcgaaaaagcttcaaaggacagcatattcaaaaatttatgattctctttaaactcttcaagctcaagtttgatcttctttgtgaatttttcctttttggacagcgtcgtttctgaatgaatgatctgagaaatctctctcattttgcactgattgtatttaatcagttctaatagaagagcttcctttgaatcaaacagtttataaatggacgcttttgatattttacaggcatcggcaattgactgcatggagacactcatatagcctttttgagaaaacaatttctttgaaacccgcaaaatctcttcttgcttttcgttcatctacataagtcctttccgaatcggcaaaaccatatggtcacaatggaaaccgagtggtcacttttgcaatgataacaaaaccaatgacctatgacaagaaaagaaacttaaaaaacacctatcttatgacaggtattttatccttccgcatgtgcggcatacatgatgatctgtccgttaagttcgacgatcaaaaggtcttttcgctcctttacagagtaaatcgctgtcccttttttcaactgggaagctgtgccgtgatcaaaatgttcggcagctgttttctgaatgatacctacttgctgatgttttgtgacggttagttgatgggtcaaatctacatttgtttgatagacagttccttcccttcaagacagcttttatatagtcatagtcgtttctaaaggatgtatcgttactttgtatgaggcgagtcatgagattgtatgtttgcacaaaatacgatacatttatcgtatgaataatccaatccatccaactcaagaagacataagactgatttctgtgctgcacgcattggctgatcctatccggttagaaattgtccgctgcttagcagaagcgggcgagaggacatgcggtacgtatgagatgaatattgccaaatctacgctttctcatcacttcaaagtgctgagggaggcaggcgtcgtgaaagtgagaattgacggtaaacaccgctactattctttaagaaaagaagacatcgagaccgcttttcctggactcgtgtcatccattttagccgtagataaagagcggtggtaagccagctgtctgtaaagcagctggctgttttatttcccataaatcgactcatacagtcttttcaccgccggctcaatatcctctggccgcatatgagagaagccgaggacgagtggaacaaagccttcctgatgccccggcaattgctcatcaagggtaaaacggtccatcccgtacattttaagctttctttctttggctcgctgtaaaatctcatgctgcgtgcggtttgagcggaactctgcgataaaatgaagtccagcattttccccaataatccgtacattgtcagtaaaaaccgtgtcgagctcttcaatgagctgcttccgcttttcctcatataaaccattcattcttttaatatgccgctgatacgccccatcttttataaaatgaagaagggtgtattgtgtaaaaaggctggctgtttgaatgaagaagtgctgttcttccttatagcgtctcaataaatgctgcgggagcaccatgtagcttagtcttaagcctggcaacaatgactttgaaaaggtccccatataaatgactttgtcatatcgatccaaactttgcagcgctggaatgctgtctgtaccatacttgaattcactgtcataatcatcctcgataatataacggccgggctgatcggctgcccagtttaagagttgaatccgccgggaaatcggcataatcacccctgttgggaattgatgtgaaggggtaatgattaagacattcggctgttttttgtgaatgtcactcatccgcacccctttttgatcaatgccaatcgtttcaattcggtgatgattgtttttcagcatttgatagagccggcgatagccagggttttctaatccgtatacttgatcggctggaagaatgcttgataaagaatggataagtgattgcgtgcctgcgcttaaaatgagctgttctgggtagcatttgacccctcgcgcaagcccgatcaaccgggcaatcgtttcccgaagctcgtacacaccttgtggatgcggaagctcaccaaacgcttcttgatggaggctgatcgccttttgttcacttttcagccagcttttaaatggaaaattggctgtatcaacagagatatgtgaaaaggaataccagtcgtcccgtgcaatcgactcctcttttaaatcggctggaagggacgagggtttcagctgacctgactcatgaaacgtttctaatgactccacaaaaaaacctttgcgttcgaccgaatataaatatccctcagcaagcagctgctgatacgcgccattcactgaattcacgctgacgtttaatgtatctgctaactctcgtttagagggtaattgatcgtgcggctgaaggtttcgatttaaaatttcacctttaattttcgtataaatttgatgataaataaatccgtttgcccctgtttgatctagttgaattgtcagcatctcgtcattccatcctctctggtaccatgaaaaaaatgatattggtactttctatcataccaaaaaatattcagaataataaaaaagacataaaggggatggatgacaatgagtcaaacgacaacaaaccgtttttcaacagaagaatggcaggggaaaagagatcaatacgtcgcaagaggcgtgagtaatggcaaccgtcatcttgcagcgaaggggaagggtgccgagctgttcgatatcgatgggaaacgttttatcgattttgctggcgctatcggtactttaaatgtaggtcattcacatccaaaggttgtggaggccgtcaaagcacaggcagacagtctgattcacccaggattcaacgtcatgatgtacgaatcgtatatcgaattggcagaaaagctatgccgcctcacaccaggcgaccatgacaagaaagccatttttctcaattcaggtgcagaagctgttgaaaatgcggtgaaaattgcacgtaaatatacgaaaagacaggccgttgtgtcgtttacaagaggcttccacggcagaacgaatatgacgatgagcatgacgagcaaggtcaagccatataaatttgggttcggaccatttgcgtcagaggtgtatcaagcaccatacccttattactatcaaaagccagaaggattaagcgatgcagcctacgatgagtacatcattgatcaattcaatcaattctttgtcgcagccgttgcaccagaaaccgttgcatgtgtggtcatggaaccagtccaaggggagggcggattcattgtaccatcgaagcgttttgttcagcatgttgcttcattctgtcagcagcacgggattgtctttgttgcagatgagatccaaacaggctttgcgagaacggggaaatactttgcgattgagcactttgatgtggtgccggacttaatcacggtgtcaaaatctcttgctgctggattaccactgagcggtgttattggcagaaaagaactgcttgatgcggcagatccaggtgagctcggggggacatatgcaggaagtccattaggctgtgtggcagcactagcagttcttgatattattgaaacggaacaattgaatcaacgatctgaacacattggacaagtcattgaggacaaagcaaatgattggagaacaacgtatccattcattggggaagtccgccgattaggggcaatggcggcgattgaaattgtggaagatcaaaaaacgcgtacaccagataagaaaacagccgcagcgattgcagcatatgcaaatgagcacgggctgctcttattaacggcagggattaatgggaatattattcgcttcttaacaccacttgtcatcacagatgagctgctgaatgaaggactggggatcatcgaggacgccttcaaagcacgctaaacaacaaagggggatggttgtatgcaaaaacaacaaatggcaaaaaccatgtcgcagtctgacgtactgtttttatccattggtgcaatgcttggatggggctgggttgtactttcgggagattggattttaacagcaggatttttaggcagtgtcatcacctttgtcatcggcggtattctcgtcatctttattggactcacgtatgctgagctttcgtctgccattccagagacgggaggagggctcgtctttgtccagcgggcatttgggatgaaatcagcgttcgtctcagcatggggcgtattgtttggttatgtgtccgtcattacgtttgaagctgttgccttgccaactgtcattgattatgtcattccaacacagcatgttggcttcctatggaatatagggggatgggacgtttattttacatgggtgttgattggatctggtggtgctttatttttaacagcgctgaactacattggcgccaagccagctgctatttttcaatctgtttttacagtggccattatcctgacaggttttcttcttttaggcggcgcaacatttaacggaaatgtagcaaaccttgagccgatgtttcaaggcggagttggcggtctcatggcggttttagtgatgattccctttttattcgttggttttgatgtcatcccgcaagtggcggcggagatcaatgcgccgaagagaattatcgggagaattttgattatctccatcgtgagtgccgttgtgttttatctgctcattgtctttggggtagctgctgggctgtcaaaaggacagcttgaagcctcttcattggcgacagcagatgcgatggtgcagctgctcggtcatcaggcgtttggaacagtgcttgtcattggcggtgtagcaggaattgtgacgagctggaatgcttttatcatcggtgcaagccgcatcttatacgctatggcggaaagaggcatgatttccaaatggtttgcgtatattcatccaaagtataaaacaccgacacatgcgattttatttcttggtgcattggcctttttcgctccattattagggcgtcctgccctcgtgtggattgtcaatgcgggcggtgtcggaattatcgtagggtacttaatagtgtccattgcctttatgagacttcgcaaagcagaaccagagcttgagcgtccataccgcattaagtattggcggacgacaggcgttttagctatcgggctgagtctcctttttctttcattttattttccaggaatgccggcctccttatcatggccagctgaatggatattgcttttaggttgggcactcattgggtatatactatatgtaatgaatccaagaacgaaggagacggtagagcatgacaaacgaactcaaagtgtataatcctgcaacaggagaagaaattgcttcagttgctcagcatacaaaagaacagatcgaagacaccattacccgctcacacaaagcattcaaagcatgggcaaaaacgtctgcgcatgaacgtgccaatatcattcgcaagtggtttgatctcatgattgaacataaagaaaggctcgcgaaaatcatcacggaagaaaatgggaagccgtatcaagaagcattaggcgaaatcgtctatgcggctggatacattgaatggtacgcagaggaagccaaacggatatacggcagaaccattccgtcacatacgacgaacaaacgcctttttgtcacaaagcagccagtgggccctgttgcggccattacaccgtggaatttcccagcagccatgatcacgagaaaggctgcaccagcacttgcagcgggctgtacgtttattgtgaagcctgctgaagacacgccgctgacggctattgaacttgtgaaattaggtcacgaagctggaattccagaggatgccatgcaatgggtggttggagatggaaaagaagtcggtgaaatattcacagatagtccattgattcgcaaaatcacgttcacaggctcaacgccagtcggaaagcatctgatcaaaaacagtgcgagtacagtcaagcacgtatcaatggagcttggcggtcatgctccgctcatcgtagacaaagatgccaatcttgaactagctgtcaaacaagcagtggcgtctaagttccgtaatgcaggacaaacctgtgtctgtgccaaccgcttaattgtgcatgaagacattcatgaagcatttgctcaaggcttcagcaaagaagtagaaaagctaaaagtgggaaatggctttgaagaagccacatccatcggcccaattatcaacaagcgcggctttgataaaattgtcggccaaattcaagatgcagtcgataaaggggcgaaaatccttgtcggcggagatacgcatttcgatgatgacaagtcgtattattttgtccagccaacggttctcacacatgtagacccttccatgaacatcatgcatgaagaaacctttgggccagtggcgccgattacgacgttcaaaacgctagatgaagcgattgaattagccaacgatacaccttttggtcttgcagcttatttctttacagagaattatcgaaacggactttacatgtcagagaatcttgattatgggataatcggctggaatgatggcggtccatcggctgttcaagcaccattcggaggaatgaaagaaagcggaattggccgtgaaggcggcatcgaagggatcgaaccgtatttagaaaccaaatatgtatccattggtttagacgaataaacgtgaaaaagactgcctgaggaatctcggcagtcttttttatgttaaacagccggcggaaaaagctgctccaccgtttctttcgtttctttcagaatttcgtggatgtaatctgctggtgcctgctccatgctgctgaacaaaagtcgttcaacaggctcaacaccaataaaattgaagacttctgtatctgttgtcatgcgatgggaggcggaaatgatccgcttagagtcaagaaaggtccttggagcatcgtgcgtgttgataatgacaccttttttgtgccgaagcaggttttcaatagccccctgctcattgatttgataagcgaagccctcagaaaaaacgcgttctacatagccctttagcatagcgggtaagcctgtccaccaaatgggaaaaataaacgttaggacatctgcttgctgaatcagcttctgctctgtttgaatggcaattgggacattaccccgtttgatcgcagccttttccaacatgcttagctctggcgaaaaaccaagagcatagacatcacgaacagtcacttcatgaccattgttcaaaagagtgctgacaacaagatctaataaggtttgatttaagctttgctggggatgagcaaatataattagatggttcatctcatagcctcctaggtggtcatgtgtctcattatggcatgcaccattaccctattcaatcctatgttggtaataataggttgggaaaatggaagttgatcgtcctagtttgcaggcaaagccttgcatctcgtgttcaaataaggtggatagaaatgaaagcgatcgtttccgtgaaaacgatcgcttacgaatcaattatttctttctaaaagcaagtcccagtgcaatcagtgctacgactagagctgcaatggacaaccctagcacaagtggtgaggaagagttggaggctgtttcagatgccttttcttcttttggtttttcttgtccatgtgaatccgttaccgtattagatgccacaatgtttgtgatggaatgcggcttatcagcatctttatcgcctgtccattcaacgaccgttccatctttataatattgatatgcatcccatgcagcttcacctgctttttcagggtttttcgctacaaaaacgaattgctggaactgtccggcaagcacgcctttacccgttgcttcccaagtcactcttgtcaccttgccatctttttcttcagttgacgttttccatccagggactggctcatattgctggaattctacacctttaggtattgtcacgacaaccttagtggttggactgtcactctcagaaggaacttttaacgtataggtttcccacgcatttgtcgcagacgtatcaggcttgactgtgacatgagcactcacaggaatcgccaataaaaatgaagcgagaagcattggtaataaagctttaacgtattttttcatatggtatgaactccttttagtttcttctaataaatgtggtatcgatattttcaaaagaaccagttaatgcacggatttcaattttccaagtacctttttcatttaacaagaggttttcagcagagaaatgaccattttttaatcgtttcagctgaaattcactcggtttctcttccccgaataaggcgactttatggatcttggctgacacagattgaatatctgtaatcgtttgtccatccttcttcgtaaatgcgacctcgaatgtgtttttccccggagcattcggggtaatgctcatggacacaatgtcacgatgctccacttggtttgcgccgaagaatggctcaggtgcaggcggaggagggctcggaatattggtaaacacagccgttaataacaaaatggcgattccgataatccactcagctcgtaacgaaacgttttgtttttgtttcttttcccatctcagcatcaagtaatggacaagtcctagaaggcccatcatgataaataaaccaagcttgattaaaaaggttcttccgtacgctgattggaaaagagcatcaaacgattgcaaaatgaagatggcattcacaaatcctgaaaacacaatgagtccaacagagagcagcgcccaagggtgaaacgctgttaacgtactccgtatgagcggctgatcttcatttggcagcttcttcaacaataaaagcacaatggctgttaaaccaccgacccagatcgatgcagaaacgagatggatgaaatcaagtgacgttgtcagtattttattatcggttgctgctggatgtccgatttgtgccttcagccagagaagcactgcgaataagagcagtggaaacaaccagacccgaaaagatgtgaaatccccttttttcatcgcgactatgctccaaatggtcagaagaacaaatgacaccatgagcatcatccacaaactaccgccagaagtcgacgcaatggtttcttgtaagagcgatggttgaaatgcccccaaaaaggacacgtctgccgctgattttgtttgaattggcagctggaacacgagtgctccgcccatcatgatcagtgacaaagtcaaaagccgtttcattcgtttcactaatacaggagaaatggctgttttaaaccaaaacagtccaaacaaaatggtcccgagaaataagctaaatgacgtataaagtaaggctttatcaatggtcgaggctacatcgatggattcattcgtttgaccttgatctaattggtcaaaaccgccacccgctttgccaatactaaacgggatcatgccagagacagagtgtccgtctgctgataccgcattccactgaatggtataaatcccctttggtaaatccttttttaaagcagcttccatgattttttgatctttaatgaccgtatctcctttatccacacgatcaccttttgcatttagcaccttaatggcatgaaatccactttcgattccttcactaaatgtgatagagactgaaggaggctgcttctccagctcttcatttgccgctggatttgagctgacgacgtatgcatgagcaactgcttcctttggaatgaaaaaagcgaacgtgacgataaggagcagaatccacttactatgtttcaacaagataaataaccgcctttctacctatgaaaatgtctcatgtatcagaaagaaagcggcagtaaactgtgagtcacagaaaaaaccgctcctcctattgtgccgctcactctaaaaggtaaacgaaacaaacagcaagatggttcactttttctgtgtcatgtctgcgcagacatttcttgattgaataggtttgatcatgtataagcctagtcgatttaagaagaggaaacaagaagagactatttgaaagttgtgaaattccaatgaattttgcatcaaaaccacggcacgtcaacctttttactccatttgtcctatgctctgacagagaattcacatcatatttcaattttgtcacacactaagtgacaaagtgacatttagtttcaattgaagggaaagtgaaagcgttttacgataaggttaagggcttcactgacacttgttcttatatcttttgacctataaagccctgaataaagggagagaagaaaggagttttcatagatgcaggaaaaaagcggattccgcgtaaaagtacagcgctttggaagctatttaagcggcatgattatgccgaatattggagcatttatcgcttggggactcattacggcattgttcattccgagtggctatttgccaaatgaacaattagcttcacttgttggtccaatgatcaactacttactgccgctcttaatcggttacacaggcggtaagctcgtatacgaccaccgaggcggggtactcggtgcaaccgcgacgattggggtcattgtcggttcggacattccaatgtttttaggtgccatgatcatgggaccacttggcggttacttgattaagaaaattgatcagctgttcaaagatcgaatcaaatcgggctttgagatgcttgtgaataactttacggcagggattctaggtgccattcttgtcgcgattgccttctacgccatcggcccagtggtacttggtctaaataaagcccttgcagcaggtgtagatatcattgtgaatgcacatttgcttccgctggcaagtattttcattgaaccagcgaaagtcttgttcttaaacaatgcgattaaccaaggaattttaggtcctttaggggtggagcaagcggcaaagacagggcagtccgttctgttcttgcttgaaacaaacccaggaccagggttaggtgttctacttgcgtacatgttctttggtagaggaaatgcgaaacagtctgcaccgggtgcgattgtcattcaattcctaggaggaattcatgagatttacttcccgtacatcttaatgaaaccaaagctcattttggcggttattgcagggggagcaagcggcgttctgacctttaccctgttaaatgcaggcttaaaggctgtgccgtcaccaggaagtattatcgccctcatgctgatgtcaccaaaaggcggacaccttgccgttcttgcaggtgttgtcgtggcagccgtcgtatcattccttgtcgcttctgtgattttgaaggcttcaaaagctgttgatgaggatctaacagcagcaacagaaaagatgcaggacatgaaagggaagaaaagcgctgcagccgcggctcttacagctcaaaaagaagatgctgaagcaaatgagcaagcagcatctccaagtgatgtcaatccagatgacgtgaacaaaatcatctttgcctgcgatgcaggaatgggctcaagtgcgatgggcgcatccatcttaaagaataaagtcaaaaaggcagagcttgatattgatgtgacaaacacatccatcagcaacatcccagatgacgccgatgtggtctttactcataaagatttaacagacagagccaaggcgaaactgccgggcgctgtgcatatctcagttgataatttcttaaacagcccgaaatacgatgagctgattgagaaattgaaaaaataacatgacgaaacgggttgagttcaatttttctttattgaactccccgttttggttgtttttctgattttccattctaaaaaaggtgtgtgatcattcatgaaacaagtactttcaaaagacaatatttttctaaacgaacaagcaggctcaaaagaagaagccattaaaaaagcgggcgaggtcctagtggcaaacggctatgtcacaagtgattatgttgacaaaatgtttgaaagagaaaatatctcatctacatttatgggcaacgggattgcgattcctcatggaacagaggatgcgaaagcggctgtccttcattctgggatttccatcattcaaattccagaaggtgttgaatacggagaaggaaatatcgccaaagttgtctttggcatcgctggtaaaaacaacgaacacctcgatattctttctcaaattgcgattgtctgttcagaagaagaaaatgtagaacgcatcatccatgcaaaggatcaggatgaactgatcgccatctttaacgaggtgaactaatatgaaggcacttcattttggagcaggaaatatcggcagagggtttatcggatctttgttaaaaacatcaggctttgagcttgtctttaccgatgtaaatgaagcggtcatcaacgagctgaatgaaagaggagaatacacggttgaactcgcagcgccaggtcaaaaacaagaagtggtcggccctgtgacagcgatcaattctgcacaagacacagcggcattaacagaggccgtcgcatcagccgatttaattacaacagctgttggaccagccgttttgaagatcatagcttcatcgattgctgaaggattaaaacagaaaaagcctgaccatatcatcaacatcgtggcatgtgaaaatatgattggaggcagctctcatttaaaagaagccgttttctctcatataacagaagaggaacaagaagcgttgtcacaaacagttggttttccaaacgctgctgtggaccgcattgttccgattcagcaccatgaggacattctgaaagtatcagtcgagccttttttcgagtgggtcattgatgagactggctttattggtgacgttcctcagattgaaggagcaacctttgtaaaagatttgacgccgtatattgagcgcaaactctttactgtcaacacagggcatgcactagctgcttatgtcgggtatcagcaaggcgttcaaacgattaaagaagccgtcgatacaccagagattcgccgagttattgaaggagcacttcatgaaacaggcagttatttaatcgacacatatggctttcagaaagaagaacatgatgcgtatattcaaaaaatcatcaagcgattcgaaaatgcttttatctccgacgaagtcactcgtgtcgcacgatctcctcttagaaagctgggagcagacgaccgtttaatcggtccagcgaaaaagatcaaacagccagtgtacttaatcaaaggcatcgctgcagctctcgcttatgactttgccgaagacgaagaagcggttcgtttgcaggcattaagaaaagaaaaaggaattgaaggtgtgctggaagaagtatgtggcctcacaccaacagacgatctctatcaagccattctgaaagaaacagctcgataatcagaaaatccctttccaacgagtgaaagggatttttttatgacttttttaatagttttccccgcttgacgatatatgatgtaagggggaatttgtatatgaaaaagaaaacgtttgcgtcaagaagtgtcttttttcaattaatgtctgccattatcgtgatcacgatcttaaccggcggacttgtaggcacaacggggtatttgttagcgaaacatgtcttaattgatgccgggaaagcagatttaaagcacatcgtcagcggagcaatggctacacttgcacagttgaatgatcgtgtagagaaaaaagaactgacgcttgaacaggcacaggaacaagcccgtatttacttgagcgggcctaaaaatgacaacaggaaagggtaccaatttcaaaaatcagattttatttataaaaataaaggctatctcgtcgcatatggagcagattattcctctcaagtccatcctgtcaatgacattggcgtcattccagataatacgaccaatcgtgaaaaaatggtcgctggagccaaatcagaaggcgaggatgcacactatgtgacctatttagataaggacgatgccaccggggaagaaaaacaaaagcttgcctatatgagtcagttcacgccctggaattggagtatcggtatcgccgtctttcaggatgaattttataaagaattagagcagatgaagctctatatcatgctcattacagcaggtgttgctcttctcagtcttggcgtcttttatttagctgctcgaggaaaagtcaggctgctcaagcaagtcactgctgcttcaaaagaaattgcggcggggaatcttgaacgcacgagtttaaaagaaacaacagatgaaattggacagctggcaaaaggctttaatcatatgtcaggagaactcaggacacttgtgagcggtctacaggaaacgagcagccagcttgttgaatcagcgacagatttatcggcgatatctgaagaaacctcagccagcagtgaagaaattggccgagccattggcgacatatcgaccggaacgcttcatcaggcatctgaccttgatgcagccaatcaacaaatgacccagttcaatcaatccatcgaaaatgtcaaagaacaaagcgatcaaattaaacgaatctctgaccaatcgagtcaatcatcgcagcagggccagcaaattgttcagcaattaaaacaatcaaatgaacaatccatacaagcgtctcaaggcattagagcaggcattgagcagctaagtacaaaagtacaggatatctctaaaattacagatacgattgaaagcatttcaaatgagacaaatttactagcgctgaatgcaagcattgaagcagcacgtgcaggagagcacggcaaaggcttctcggttgtggcgagtgaagtgcggaatttagctgagcagacaaagcaatcagccgttcaaattcagcaaatggtacaaggcattaaagaagaaacgacggcaacagccggtatgatgtccaagacaatggatcgttttgctgagttagataaagcggtacatgccacagaacatgaattcaatgccatctctacgtcgatttcacaaaccatcgttgaaacagacgcaatggcaaaagagctgaatgcattgctggagcaaaacgacctcatcacaaaagccatgcaaggcgcagcccatatttctcaagaaaatgccgctgcgaccgaagagatcaccgcatccacagacgaacaagtgacagccatctccaatgtggcaaaagcagcagaaagactcaatgaactaagcatacgattgaatcaggacattgcacgttatcgtctataaatcattttgactgtgtgtcacttgtcaggtactatgtagttaatctaaaaaccttgctcacgcaatcaaaaggagtgtaccggtcatgaaaaagaaaatattgatgttcttaccttgtggctatggatactccactgctgttttcttttagaatagatagaaattggtgaagtctgtctacatgaggaagaatctagcagaaaaatcaaagtgagtgagggatataacatggaaaaaatcacgagaaaaaacccagaaagtatgccgaagcccgttggcagctatagtcatatcacaagagtaccaaagggcgcgggattatttgttacatcgggtcaagtcggaacagatatggatggacaggtaccatcaagtttaaacgaccaggtaaccaatacgtttgaaaatatcaaaaaaatccttgaatcagaaggattgaacgaagagcatgtcatcaaggtcaatatatgggcaacggaagaaatcgactgggaccatctatatcctcagtgggatacgatctttaaaacagcttacccatcaatgacggttgcttatgtatcagctttaggatggcccgagctgaaaattgaaattgagctatggtgcgccgatatatgatcaaaaaaaagaacagtgcaaactgttcttttttacttgaatcgaaaccgctttgtcatccatgcagcgatcaacgtaaagacggtgtagatgacgacccaaatgagaaaggattcatccccgccaatgtatgtgtacataagaatgacgctggctaacaggacaatcaaagttggcatccaaacattcttcaaaagcattgtgccaaaaatgccaatcagcacggaaataatgggaaagccgaacacaatgaataagacaaaaacagccatattgctaactcctttaacaagtgattacatcaaaacatataagaccgatgcagccatgtgcggaactgcaaagatcatcaaaagaaaagccgtatcaagacgccacatgcggtgttcttttgattcagaatgataggctgcccgcgtttcttccccgcttgtccaagcccccattagaagtccagacatcatgacgccaataatagagattccaccactgatccaccctatccactcatggtgctgcaaaataatagcggcactgcaaatcacaatcattgagcaaactccggcgataaaggcatgtttttttctcatactgattcacttcctttaaagaagattaggaggtggcatcacatatttcaatgaaatgcccatcaggatcagcgacataagcgacggtttgaccccatggtttctttgcgggttctttgatgatcggaacccctttttccttcattgatgcaatggtttgatccacgtcatccacaacaaaccctatctcaaacgtttgagaggattgatttgcttcagggacaggcaatccaagtgcatctttgacatcctgacgtgagttaattgacaatgtcacatctccagtatcaaactcaacataggattcaaccctgagtttcataggaaagccaagtacatgttgatagaaatgaatacttgcctcaacatcgtttacatatagaatggtatatttcattttcatgtgaaaaactcctctcttcatatacgtgtaaaaaacggaaaggtttcccactcattgtaccatataggatataaagcatgttttatgccaaaaaaatgaatttttttagcgcgatagtcttgaaaaacaaaaagtggtgacatatgataaaaatgtaaaaatagaaaaaatagggggatcatacatgttgaaaaaaatcatggtggctgtcttgtcattaggtcttttactaagctttacacaagtcgacacccacactgcagatgcaaaaacggtcaagtcctacaaaaactgcaaagcactgaacaaagtctataaaggcggcgtggcaaaaagcaaaaacacgaaaaacaaaggcggcaaaacaaagtacaagccgtatgtgtcaaaagcactttaccaaaaaaatatgcgacttgaccgtgataaagacggcattgcgtgtgaacgctaagccaatgcaaagagacctgtaacaaggtcttttttctatgggatcaaactcgtccctttgtgccagcttcctctttatattaaaataaagatagttacaaaaaatgatacaaagtggggtactcaatttgtccatacaagctgataagaaagacatccgattgattgccattgatatggatggcacgctgttaaacagtgaacacgtcattccagaggaaaataaacaagccattaaagatgctgaagcaaaaggggtccatgtggtcattagcacagggcggacgctgatgacatgccgagagctggttgagccgcttaagctgtcttcttaccttgtgacagcaaatggaagtgaaatctgggattcaaacttccaactgatcgaacgagatctgctgcatcctgatcacgtccaaatgatgtgggatctaaaaaataggttcgaaaccgattactgggcttccactgtggagaaagtgtggagaggtgaattcccagaacgaattcatgaccatgaatggttgaaatttggctttgatattcatgatgatgacgttcgtgaggaagtacttaatacattgaaagcaaatgagcatctagagatcacaaattcaagtccgaccaatatcgaagtcaatgcggcagggattaacaaagctgcggctcttgcaaaggtagcagaacgcattggctgtacgatggacaatgtcatgtcacttggcgacagcctaaatgatatggccatgattcaagaagccggattaggaattgcgatgggaaatgcgcaagaagtggtgaaagaagccgctgattggattacagctcctaacacagaacatggtgtagcaaaagccatccaacattgggtgctatctaaataaagaacatgatgaaaaagcgagaggcgatatcctctcgcttttttaatttctcctagttctattgttatgttttctgacaatgtcatgtgcaatctatccaaaattgatataatcaatataaattcgaatattcggactttatattccgttattcggaacaacaaggagggatcctatgtatcaagtggatatcaactgtgatttgggagaaagctttggtcaatacacaatcggtgcggacgaacaaattcttgaatatgtcacgtcagccaacattgcttgcggttttcatgcaggagatccaacggtcatgagaaaaacggtcagaatggcgctggataaaggggtccaaattggtgcgcatccaggtttgcaagatttggtcggctttggcagacgtccaatggcgatctcggcagaggaagcctatgatctcgtcgtctatcaaattggcgctctatcagcctttctcaaggcagaaggcggcacgatgcagcatgtcaagccgcacggcgccctttacaacatggcggctaaaaatactgaattatctgaatcaattgcaaaggctgtgtatcatgtcgatccaagtcttgtgttattcggtctctcaggcagtgaacttgcgttagcaggtgagagaattggccttcaagtggctcatgaagtattttctgatcggacctatcaagcagacgggacgctgacatcccgccgcgaaccacatgcactcattgaagatgatgaacgggccgttcagcaggtcgttcgtatggtgcgagaagggaaggttcgtaccgttcaaggggaagatatttcgcttaaagcagatacggtctgtattcacggagacggcagtcatgcgcttcaatttgccaaaaccattacatcaaaactaaaagaagcgagcattcatctcaaagcctttcaataaaaatcgtcatcaaagggggaaacagcatgaaaaaagaggaagtcaagcacacgaaggcaccaaaggggaatcgttctatgctgatgggcgcagcctttttaatggcgacgtccgcaataggaccgggatttttaacacaaacgactgtcttcacacagcagcttgcggctagctttgggtttgtcattctcatctctattttgttggatatttttgcacaaacgaatgtatggcgcatcatcgccgtgtcagaaaagcgaggtcaggatattgcgaatatggttctgccggggctcggttatgtgctggcctttttgattgtcattgggggacttgcctttaacatcggaaatatcgctggtgctggtctcggttttcaggtcatcttcggagtcgatccgcgaatcggagcaggggtcagtgctgtcattgccattctgatctttgtgatcaaagaggctggaaaagcgatggaccgtttcacacaggtagcaggctttgtcatgatcggcctgatgctgtatgtggcgatttcaacagcgccgcccgttggggaagcagcactcagaacatttgtcccagaagaaattgatattctatcgattgtgacacttgtcggggggacagttggcggctatatcgtttttgctggcggacatcgtctattggatgctggaattaaagggaaggatgcacttcctcaagtgacaaaaagctctgttttcggcatcctgattacatctgtgatgcgtgtcgctttatttttagccgtgctaggagtggtctcaaagggtttacagattgatccagcgaatccgcctgcttctgtattccagttagcgtctggaaatgttggatataaaatgttcgggattattatgtgggctgcggcgattacatcggttattggagcggcttacacatctgtttctttctttaaaaccttctcgccaaaaattgagcaaaatcaacgtggcattatcatcggctttattgccctctcgactatttgttttattacgatcggacgacctgtgaacatattagttttagttggggcgatcaatgcattgattttacctctcgcacttggcaccttgctggttgcggcctataagaaagaaattgtcggcgattaccgtcatccattctttttgacagcgtcaggtgcattggttgtcgtcatcatggctttgatgggcggatataccattatgaatgaaatcccgaaactatggagttgatttgaatgagtattgatcaaacatatgagccttcacagatcagagagttgattcgtaaaaaagaaatcacaggaccaacggcgggtttagcagagggatatgctcaagccaatttaatgatcgttaaaaaggaacttgcctttgactttcttttgttttgtcagcgcaatccggctgcatgccccttgcttgatgtactggagccgggtgatccagtgccgagacggtcggcaccccaagcggatattcgtacggactttcctaaataccgtatttaccgaaaagggattcttcaagaagaggtttcagatatctctgcttattggaaggatgatatggttgcctttctcatcggttgcagttttacgtttgagcatgcgctcatgctgaatgatatccctgttcgccatattgaaaacggtcataacgttccgatgtatcaaacgaatatctcttgtgaaagagcaggggtgtttcatggcccgatggttgtcagcatgaggcccattccggcgcatcagattacaagaagtgtacaagtgacgtctagattcccgtcagttcatggcggccccatccatataggcgacccagcaatgattggaattgccaatgtggatcagccggactttggagaaccatctttgatcaaagaaggagaagtcccggtgttttgggcatgtggtgtgacgccgcaagccattgtcatgcatacaaaaccagacattgcgattacccatgcacctgggcatatgttcatcacagatcaaagagatcaacagctcggtgtgctttagaaagagagggatcctcaagtggcattttcaacgataaaagagtctatcaccttccacccgctaggagatgcagcgatcgttatccaagcaggagcagacatatgtgaggagattcatgagcgtgttgtgcagctgttttcgtgtattgagcagcatccatttgccggatatgtggaagctgttcaagcctttacaaacgtgactgttttttacgagccttatactgttcatcaatctgcccaccttcaaaaaatggacttgtctccgtatgaatgggtgaaaaactatattgaaacacttcttgaagagaaatggcaggagggggttcagtcgaagcgccgcatcgtcgatattccagtctgctacgggggagagctgggacctgatttagaagaagtcgcccggatcaatcgtttaacgactgaggaagtcgtgcgtattcacactgcagggacgtatcttgtctatatgattggatttgccccggggtttccatttttaggcgggctgtctgaaaagatcgcagccccgcgcagggaaacgccgagaatgtccattccaaaaggatctgtcggcattgcgggaaagcagaccggcgtttaccccatttccacacccggcggctggcagctcattggacaaaccccgctgccactcttttacccagacgagaaagtcccaagtctattgagagcaggggacgaggtcagatttgtccaaatgtctgaaaaggaatttttcagcatgaaggaggcagaacgttgagtattcatgtcatcaagtcaggaatgttcacaaccattcaagataaagggcggaaaggctatcaaaagtatggcgtcttaacgagcggcggcatggacccgctctcacttagaattgccaacattctcacaggcaacgaggtaaacgaagccgtgctggaaatgacattaatggggccgggtcctgtgttgacgtgtcaaaaggatgagcttattgcagtgactggcgctgatgtggaaatcgacatcgatggagagccagcccctttatggaagccgctctttgttcgatcaggaagcacgatcacctttggtccttgtaagagaggctgccgcgcttaccttgctgtggcaggtggattcgatgtggagccggtcatgcagagcaaaagcacctatgtgagagcaggaataggtggactgaacggacgtccgcttgaaaaaggagacgtcctgtccattggaaagccttcaatcgtagcggatcgattgtctgataggctcaaaagcgaagtgaaacaggcggcgtacagcgcacccgattggactgtaagtcatacgcattttttgccgctgcggaaatcgcccgtgattcgggtgctgccagggagacacctttctttttttcaagaaatatctcaacacacctttttcgaacagccttaccaagtcacgcctcaatcagatcgcatgggctgccgcttgaagggggagccggttcatttgaaagaaaagcttgaattgatttcagaggcggttgcctttggttctattcaaattcctcctgacggccagccgattattctgctggcagatcggcaaacaacaggaggatacccgcgtattggagaagtagcgacggtcgatctgccgctcattgcacaagcgatgcctggggcgaatctgtattttaagcgaatcgatcatcaggacgcagagcaggcgctatttaagcaagaagcagaattgaaggagctggctgccagaatcaagctggaagcattcgtttagaaaaggggatggacatgcaaaatacaaataaaaccgtggtgaaatcaatggagattttgcggctgtttatcgctcgtgaccaattaacgttaaatgaaatgatcgagctctccggcatgccgaaaacgtctgtgcaccgcatggcgagctcgttagccgatatgggattattagaaaaacatgattcaggtgtttatcgtttaggcctgatgtttcttgaatacggtcagcttgtggcggaccgccttgatattcggagaattgcaagaccatttatggaaggcttgcgggatgaagtgggagaagctgtacagctcatcgttcgtgaaggagacgaagccatttacgtggataaaatcgaagggacgcagcctgttcgtctctacaccgccgtcggcaggcgctctcccctatatgcgggtgcttgtgcaagaagtattctctcctttttaccagagcgcgagagactcgcttatattgattcgattgagctagggaaaatcggaatcgggaccattacagataaagaggttcttcgaaacatactggatgaatcaaatgaaaggggctatacgttaagctattcggagcttgaaaactataccgctgcggttggagcccctattttcaatcaccttggagaagtcgcagcaggtattagcattgcagggtttgaagcaggctatcaaaaggaacgccttccatatttaattgagcaggtcaaaaaagccgcgagtggtatctctagagagttaggctttcatctaaacaaataaaaagccaatgaccgttaagatcattggcttttcgcgttcagtttattagaaagtttttcctaaagcttttgcacgttcgatcgcatctgctttaatttgctctgctttcgcaggttcagcattgtgaccttcaacgataagaccttcgaaggaaggaattccgaagaagctcgcaattgtaccaaggtaacggtggcctgcttcaagttcagcagcaggaccttcagagtagtatccgccacgtgcttggatgtgtagagcttttttgtctgttaataatccaacaggaccttgctcagtgtatttgaatgttttaccagctacagcaacagagtcgatgtatgctttaagaactggtgggaatgagaagttccaaagtggtgaaacaaatacatatttgtcagcagaaacgaattgatcgcttaattcgtttaggcgagcaactttcgcttgctcttcagctgaaagtgtatcgaagccagcacctgattgcagcttgccccagccagcgaatacatctgcatcaatgtgagggatgttttctttgtacaaatcgatatgtacaacctcgtcacttgggtttgcttccttataagattcgataaatgctttagcagtagccatactgtaagaaactgtttcatcatgcggatgtgcagtgatgtataaaacttttgccatgttcattcaatcctttctatttcagtgttttttttagtgtatcccaaagatacactgaatatgtggcatctttaatcatattggaatgctatgaaaaagatgtaacaagcacagttacataaaaactgatattttcattgtaatcacaatgtagtttgaagtcaaggtataaagtctcgaaatcaagataaaaagtttgtaaatttttctgaaacgcttggagatacggatttcatcataaaaacctactcctattgaacaaaaaaacagtcgatctcacaagtaaagagattgtaaagacgtctcatgaaaaaaagatgaatgcccctaagccatctgctacaagcatctgttctccgatttcgtatatataagagaaggcaggagagagtgagggataagagtgggacgatcctatgttgcgattggagattccttaacagtgggagtgggggcacgtttatttggcggaggcttcgctgagcggtatcaatggatgcttgaaaaaaagacacaggcgtcagtcgagctctccgtatttgcaaagtcagggttaacgacggatcagattttacagctgttcaaacgatctgatgtgaggcatgctattgcaccagctgacatcatcaccatcacaggctgcgggaatgaccttgttcaagcgattcagcagtatgaaaagggtgaagatgaaaagaaactgctgcaagcgacgctgcattgccaagcaaatttcagcaaaatgattcaagaaatcgctcagatcaaaagagggcagaagcagccctattgcgtgtatctcatgaatttatataatccttttccgcaaataccaatagcggggcggtggcttcagcaatacaatcatcagcttcgcttgcttgctgcaaatccgtatgtagaggttgtggatgtgtaccgggcgtttgagggacatgaaagagattacttatcgattgatcaatttcatccgaaccataaaggatatgaagcaatggcaaaagcattgtttcaacaatcctgtaaacaactgtaatccgttggggttgcagtttttttcatccttttcaataaatgacggtttcgatatgataaaagaaacgaaggcgaaagaggtgtgcaggcatggaggaaatcagtgcatattttcatgaaatgacaggaaccgcttatgaagtgggaaaacagcaggctgtctggcttaaggagaacccgttgctacagacacaatatattcgaacagaaccgctagaaaaagaggctgtgaaggaaacgaagcagctgatgcgcccttatcttcctcagttagaagaagagattgctggattttgtgatgaactgcaattagatgagcgttatttgacctttttctattcatctcatcttcagccaggctgttcccactgcgtgaggcaggggaatatggcggccggtcaacaaacggtcatgctgcgtaactatgatttttccccgatatttgatgatatgcgtcttgtaacgacacatgtgaagagcttggcatctcatacaggctcgtcgctgctcttgtttggcagatctgatgggatgaatgagcatggtctttctgtcacattctctgcttgtggtccgccggttggaaatgaacctggtttaaagccgccagcagttgccggcttgcaagtgtatcatgtgattcggtctgttctggaaaactgtagaacggttgaggaagccattttctctattaaggaaatgcccgtcgcctcaaatgttcacctcatgtttgccgatcgaaaaggagaagcggctgtgattgaaatcattgatggccggaaaatggtgagaagaccggaggcaggttatattgcagccacaaaccatccgattgctgatcaaacaggaaaagggatgacaaaacatcattctgttgtcagatacgacatgttaatggaggctttagaacaacgacgatcaagtgattctcttgctaagctgttcaagacagaatttccagatggtctgactgtgcacaattatgaggagctgtttgggacgatgcgaaccgtcatcttccgcccggaggaaggaacgatggattattgctttggctctccaatatataatccgacttattctttaaaagctgggggttcactgccttttcgtgaacaaaaggttcaatttcatcaaaaggagtatggaccgtcattttggagaagcgtctgatgaatccttgtttttaattttgtcacagcccatgtgccaaagtcagatcaacttaagattgcatcgtttgttgaaagcgttttatattaaggtgtgacaatagacctatttttgcagaaggaggcatttcatgtacataacggcacgagaacagaagatcatcaaatacatcattcagcaaaatcgttatgtcaccattcgtgagatagccgattctgttcaggtgagcacaagaaccattcatagagaactaaaatcgattaagcccatattaaagaattatgatctttcactagataaacagccggggaaaggcttgaaggcagtcggtgaacaggaggataaacagcggcttcttgctcatatatcaaatgaggatcaaattgaatatagctctgacgaacggaagctcttaatcctttgtgcattgcttgaagcaaaggaaccggtgaaattatatacactcgccgccgatttgcaggttacaaatgcgaccatcagctatgacttagatgaactgacggagtggatcgctccttacagtttgcagctgatccgaaaacgcgggtatggcattgaattaaaaggaccggaagaagcaaaacgaaagattgtcgggaaccttattgttgaccggctcgatattcaattatttttagaaacaattgaaatgaatatcaaacatcgaacgaaagcgacggaaaaggtgtttggcgttgtcagcagagggcagctgcttaaggtagaaagactgctctttcatttgaaaaatagactgtcactctccttatctgatagtgcctatattgcccttgtcgttcacttaacctatgccattgaacggattcagcttggtgaaaccattcgaatggaagaggaagagctgcttgaactaaagcggacgaaagaatttgaatcatctcagcgaatcgcaagagcacttgaacgcatgtttaatgtggagatccctgaagcagaggtcggttatatgaccatccacctgcgcagtgcaaatcgcagctttggggcagaataccgtattgatgagatcgagctggatatagcgatcagaacgaagaagctcattgattttatttcaaataaaaccggctatcatttaaatgagaatgattcattgtatgagggactcgtgtctcatcttgaacctgccatgaaccgtttaaaggaaaagatgagaatctataatccgctcacacaacaaataaaaaaagactactttttgctgttcatggcgattgaagaaggagtcgagcgtttctttccagagattgaatttccagaggatgaaattgcctttatagtgcttcactttggctcagtgcttgaaatcaaaaaagaagaaacaaacattcatgcattggtcgtttgttcaagcgggattggttcctccaaaatgctcgcctcgcggctaaaaaaagaattaccggagatcgccaaattcgatttatcctccttaatggagctaaaggaaattgatgcatcgagctatgacatgattgtatcgactgttccgatcccatatgaccatatcgattacatcatggtcagtccgctcctaaacgaggatgacgccatgcgtgtgaaagctcatattaaacggaagatcccttatatgatcgagaaaaaaagaacaaaagaagctgttaaagaatctgtgcaagaaacggttgatatgatggcggttgcagagcaggtgacgaattatatgtctgtgattcgcagcatcttgtcccattttaccatcgaaaatagagagacgctgccgcagcatgaggcaacaatcagacagctgcttcgtcagcttgaagaagaaggatctatcacacatgcggatgatgtagcgagcggcttactggaacgtgaacagcaaggcggtttaggcatacctggtaccgagtttgctctttttcatttaaagcatgaattcatcaaggaaccaatctttcatatttacgatcttgatcaggcatacgaggtgaaaagcatggacggcgggcagcaaatgatgtcacgaatgcttatgatgctggcgccgcaaaagcttggcaaggaagggtctgaaatgtttagtctgatcagttcatccatcattgaaagtgaggaaagcatggtgctttatggacagggatcaaaggaagagattgaacagaaattgcatcagctgttctatcaatttgtaaaagaagcaaaatggtaagaaaaaagccgagagcttattcgcttctcggctttttggctgtgacacagacagcaagtgttggacgaatttcctcatactcaacagaaaaatggtcaaaccccgcaaactgtaagtcattcaatatgttttcacccatctcttttgtccggctcgcatcagcacctttttctcttggctgcatcacaatgacgagttttccgcctggtttcaacgtgtgataaaggttgagtaggccagtctttggatcatcccaaatcgtaaagttgttgacagacagtactttgtcatactgctctccgggcaagcgtgttttctcgattttccctacatacagccggacctgtttgtcttttgaccgtttgctgacgcgggactgtgcttgctcctgcatggtggcggaggcatctagaccatcaatgtgaagatcttcataatgcttaagcatatgtttgatgctgtagccgggcccatagccgatttccaaaatgttttcactatctgtcagatctaagtgctggatggcccactgattcaatgctttattttcatttgccataatgaagcctgcgatgcttccgagccagccttttggtctgctaaaggttttcgaaatggttgacagcatttgagaacgctcctttttaatgatcatgtaaccgatttttcccatcttgaaacatgccaatttacaaaacgcatctgtgcagtttagggatgtttgagtaaaaaaaagaggtggtaatgaaaggatacatcaacaaatcaaggaggagcttacacatggatttacgtgaatacttaacaaatggcattccgcgccaaacacaggatcagcagccaggcagtgaaagagaaatgaatcctgcgccgatctttgaggatgaatcatatcaaggatctggcaagctcaaagggaaagtcgcactgattacaggcggagatagtggaattggacgtgctgtatctgttgcctatgcaaaagaaggtgcacacgtcgccattgtgtacttaaatgaacatgaggatgcaaaggatacgcaaaagcgcgtagaacaggaaggcgttaaatgtttaacgattgcaggagatgtcggtgacgaagccttttgcgagaaagcggtagaaaaaacagttgaagcctttgggcaattagatattttagtgaataatgcggctgaacagcatccgaaagaacggattcaagatatttctagtgaacagcttcaccaaacctttagaaccaacttctattcttatttttattttacgaagaaagcactggattacttaaaaccgggaagtacaattattaatacaacatccattaacccatatcgaggcaacaaagtgctgattgattatacggcgacaaaaggggccatcaacggctttacgcgttctatggcacagtcgcttgtgaaagatgggattcgggtgaatggtgtagcgccaggtccaatttggacgccgctcattccatctacatttgatgaggatagtgtggaaagcttcggggcagaaaccccaatgggaagaccaggacagcctgtagagcatgtcggctgctatgtgctgcttgcttctgacgaatcgtcttatatgacaggacaaacacttcacgtcaacggcggttcctttatgaatacatgatcaatagcgccaccgcccagctttgattgggcggtgtgtttagtatttcttgcgattcttctgcacagatgagacagaccatacgataatgcccacaacaactgccgcaatgacaagtgaactcaaatggaacatcgtttcatgatgcatgttcaacttctcccttcattgagcctgttttctatagcatcagccagaagatctctttttatgaaaaacacatttctttgtttaatgaatggattgtcgtggaaacctaagagtacggatgaaatttgaaggagtgaaacgatatgtcacaagaagaattaaaacaaaaggtactcaacttattagatgaacaaaaggtcggaacactggcgaccgttgaacaggataagccgcatacccgctacatgacttttttccatgaagggctgacattatatacaccaacgagcaaagaaacacataaagcagacgaaattgaaaaaaacccgaatgtccatattctcattggttattcaggtgaaggattcggtgacacgtatgcagaaatcgcaggtaccgcaacattaaccgatgatccagaactgatcgaccgcctttggtctgaggagatggagaaatggtttaaaggaaaagatgatccgaatctagtgattctgaagattgatccaacctccattcgttacatgaatgaaggaagccgtacgccagcagaattatcactttaacacttgcgtaagctgggggtatgtgttatagttttatattaagtgttgaaataagcaaataaataaagaaagtaaactttcttttttctatgacataatgagaagcaatagagcttctacttgataagaacgagacgctgtcaaagcgaacaacttattcttttccttctgcacccgccccctataaaagcggaagagtggaaaaaagacgttttgatttacaattcacactggcacggcttcggagccgtaaggacgaatgagaggtagggctttcgttgtcttgttatccagaacttccatggcgtttactttcaaacgtaggttcactcggaacacatatgacacactgatatgatcgaatcttaattcatacactccgtaacggagatcacacattgattatttatttgcatgaaaagagcaaggaaaaggctgccatctatttggcagcctttttcattgggttcatttcatgatcactcacttcttcctttcttctgataatgccaaatccgcccgataaaaaagaacatcactgcaaacaaaatagaaaagacgaacatgtccaagagtgtcacgccactatttgggtgcacaatgccaaaccaaacccattgcagaacaaaagagatagcaaaataactgatgaatgctttcatgattttccccatttcacttatttttttgaccttttagccacaacatccaaatgaagaaggaagcaatgacacacgtaagcaaagtgatgggcggcaaggtatgccagctagtcagcccctttacaaaacacatataaaaaaagaaaatggaaatggatacgagcacccattgcttgaaccaacgaggaacacgcagccaagccgctagaaagatagaagatagcttatccaatgagaaaaactccttttttgaatctgattggattttatcgcaaacaacgaagtttgtaaaatatggaattcgaaggatggaatggtattcttctagcacgaaacattctcgctgcactaacgtataagataaaggaacctcatgaaaggaagcgatcaagtgaaaagaataccagtgatttttctacgatatattgtcttctttattccagcgatcattatcagtttcatggtgtggaaccattaccaagatgatttgtcggatgggaaagtaacagagtatgacgtcaaacgaatttttacatttgatgaaggaaaacgagtggtgagtgctgtatcaaaagaccagcagctccattttgcaatgtatgatcctcattcaggaaaaagaatcagtgaatggaccacagcaagcgatccgtttaatgaaatgtggccatccattcaaggaaacaatctcttacttgctttaaagaataaagacgggcaactggtgatcgagaaactaactccaagcggagaaaagaaagagctcgttcaacaaaaaatagagatcccctcatttttaaaaacgaatacatatcaatggaatggacagctcgtgtttacaggagaaatggaaggcgccgctgcagtcctcggtgagctaaagaatggtcagtttcatgtgcacaatctcaacgagctaaagctgccagcaaggccagtctccatggatgtcgtcatgaattcctttagagggcagacgcctattcctatatttgaattgactttgaaaaatgaccagaaggcatatgttagcggtatctcaaacgagaagcatcagcttggtgtctatgtctccaaaaacgctgatccgtttagcctcattgaagatacagttgagcagaggctgcaaaaaaagattggatcatcacaaaactttgctgtcgccgtagaatcgaattatccaaaaagggcaaggaaagtgaatgcagagggaaggcttggggaagtcgtcccaacaccaaaaccaatttatcaaacctatatctaccagcttaatgaagaagaagttcttattgcaggctctactgcaaaggacgaagcaaaaggcaaactgactggatatatttataaccatcgcacgaataaggcgacgtctgccagcaagctttttcaatcgttgtcatatgaatccttacaaagagaagagctcactttcaataaaaatgtgaagagcgattggatctattattcattcgacaatcaattaacgggtgcatatgagacgacgagcagccagctaaaggaatttcctttgaaaaaagtcatctcaatcgaaaacgcgagtcctgctcaccaaacgtctgttgacacctttatgcaatatgtcatgaaaggcgggccactcattctcaactgggcgatatggctgtttattccactactgttatttgtactagccatcttcctgccgccgattttgagactggtgagaaacaacaagattaaagacagtgtcacattagaagccaatattgtatctgtcaaagaaacgggcacctacatcaacgaacagccgcttgtcaaaatgcagctgcaatttcaatatgatggggaaaacatcgagaagacggttaaaacagttgtatcctttacccagataccgcagccgggtcagcgtatcgccattctctacaatccgaagaagaaaaaagcgatgctcttaaaagagggggacttctcacagccaagcgagccaaagatcatccaaggcgctgttttaagaaatatagaatcatatgaaaccgtaggacgaggcactgtcttatcgcttacatttgaagcagatcagaaaaggtataccattccgatgattcaagccgctggttttgaatttagaaaaggagaaaaagccgatctcgtcgccatcagcggtcagttgaaaatggcagcctatggccatgaagtgcggaatcgatcggggaaagatgtgacgttaacaggaaccattcagcgagtgaagcaatatccagtcacgattcatggacaaaagcctgtcatgctggatgtgacggtttcaagcggagatcagtctattacaaaaacggtcagccaattcatccctgatcatatgcaggtcgcaccaggaactccaatcacgatccagacaaagaaagaagagctggatagagaaatcggtctcatgcaagagaaacaaggaagtgcaaaagtgacccatgtcgcatttgctggcgtcatcggcaaccagccgctagcaatcattcagattgagagagatggcatgctgtatgaagtgaaacagccaatcgatccaatgactagtgtactgccaggtgatgaattatgggtggcgtatgacgaaatgacgcgtcaagcagccattgtgaaatatgcatcaatttaaaaaagcgttcctttaacagaacgcttcagcgtgtagacaaagggctaaaacgacattcgatttagcccttttttgattaagcctttgtatcatactggcggagcaccttatcataggcgaagttgccgaaaggaatgaacgctgcaaaaaaaccagcgatggaccatttcaaatgccagcgaactttaaaagtcacatatgccaaaacaagcatatagatgacaaacaatgcgccatgaagagagcctacaatggtgactgccatcggaatatccgcaaaatatttcagaggcatggcaattaaaagaagggttaaaagagacataccctcaataaaacccgcctgtcgaagacggctaatacttgtatgcatatacaaatcctcctgtataaaagctagtttctcatcttctaatataaacgaaagatcgtctggacatgctaaaatctacgaaaaattcaaaatatgttcatgtaatgcttaaaaaatgggaaaaaggaaaaatcacttaatccttgtttgtttcagagagtacttgctttaagtgcatcacatcatgtaataaatgatccgtcatcgcttgaacggcttctgtggagcggcgctctttcatttcagaataaatggcagcatgctctttttgaatcgtctcagcacgcgctccgccgctaaaatgaaagatacggcaaaaatgaatgagtgcattcacatgattcaattgtttacataagcggtgattgtgactcgctagaataattttttgatgaaaggcttcatgtaactggacgatttctttagatggcagctgctgcttgattgctccgtctgcctgcttgaggacctgctcaatatcatccagctctctttgcgcggcttccttgcatgcaagctcaacagctagcgtttctagggcgattcgaacttgataaagctcctcgacatcttttttcgttaacgtatagacagagtagcctgaccgatgatcagcgatcaagagttcatctttttctaaaagcctcatcgcctctctaaccggtgatcggcttgcaccaaattgtttggcaagctgtgtctcattgatgcgttcccctggctgaaactgcccatcaaatatcatttgcttcagctgttcataaaattgcatatggtatggtgctggtcttttcatctcgaatgaattcatcccgtcattccctcatttacacatcatcttttgtctcatgttatccaagtttttccctctaggcaagcctgcatcggaaaagtcaatatcgtacaattcaagagaaaaagggtgtgctacactaatgatcagttcagtgaaagaggggatcgacatgaaaacacaagaagaacgaacggtacattttgatcaggacttgcaaatagaggcgtatcgctttcatggcatcatgcaaaagttcccgaatcattttcatacatactatgtgattggatttattgaggacggtcaaagacgtttgatctgccaaaatgaagaatacatcattgaaaagggagacatccttcttttcaatccatatgacaatcacgcatgcgagcagattgatcacaggacactagattatcgttgtttaaatatagaagcagatgtcatagagaaaatgtttcagcacaagccacattttaaagcccctgtgttttcacaaagtgaactgacaaagccattatatgatcttcatcaaatgatcacagaagaagctccagctttgaataaacaggaaacgttttatttctttatgaagcagctgattgaagcctatgctgatacatcagaggaaaaagcgtcagcagcgcatgccgccgaacagaaagtccaagatgtacagcaatatattgaaacataccgcacggaaaatatttcgttagacgacttaggagagcttgtgtctatgaacaaatactcccttcttcgtgcttttacaaagtacagagggatcacgccgtatcgttatttacagacagtgagagtgaactatgcgaaggagcttctcgcccaaggagtgaagcctgtagatgcggcagtctccgctggtttttctgatcaaagtcacttgagtcatttcttttcagaatttattgggctcaccccagggcaatatcagcaaatttttgcaaagcaggtaacagcagatgaaaaataaacagctgcttggtcatctagcggccatgttcactatttttctatggggttcgacctttatctcaaccaaaatattattaactgctttttctcccacagagatattattttttcgcttttttattgggtatctggctctgatgatgatctatccggtcaccatgaaggtgcagcgtaaaaagcatgaagcgatgtttgcgctcgcaggattatgcggtgtggtcttatactattttttagaaaatgtcgcactcacctatacgttcgcttcgaatgcaggtgtcatcagttcagttgtgccattcttctcatttttattggcttattttttattgaaagatgagccgctgcatcgccgatttttcataggcttttttatcgcgatgacaggcattgtgctgattagctttaatggaatgacgacgttccaattgaatccactcggtgatgtgctagcattaacggcgaccattgtctgggccttctattctattttatcgaaaatgatcaaccaatatggataccatatcattcaagtgacgaggcgtgtctttttttacggcttgctttggatgcttcccctgatctggcattttaagattcgtttagactgggagcgattgacgaacccgtcgtttgcctttcacttgctgtttttaggcctgttcgcatctgccatttgttttctaacatggagcttttcggtgaaaacgctcggtgtggtgaaatcgagtgtgtatatttatggcgttcctattattacgatggtcatttcaatgatcgttcttcatgagagattgaccctcatgtctgtactcggaacggcactgaccttaggaggactgctgctttcagataaaaaagatgcggggaggaagaaacagaaaccctcgatgcttttccaggataaacaggcgctttgatcaaaaaagcgtcttttgtccattgaaagaacatgaactctctagtaaactcaaatttaaacggtcgacggtcgaccgacgataaagggggagaaatgaatgaagcatgtttcaattgcggcgataccaggtgacggggttgggaaggaagttgtacctgaagccatacgagtattgaaagcggtgtcagaattacatggcggtttgtcttttacctttcaggattttccgtggagctgtgaatattatttagagcatggcgagatgatgccaaaggatggattacatcaactgaaaacctttgacagcattttcttaggggctgtcggagatgccaatttagtgccggatcacgtatcgctttggggactgcttattaagattaggcgggaatttgaacaggtgataaacgtcagacctgcaaaacagctgagcggcattcgctcaccgcttacgcagccaaaggatttcgatcttctagttgtcagagaaaacggtgaaggtgaatatagtgaaattggaggccgtatttatcaaggagaagatcagcttgctgttcaaaatgcagtgttctcaagaaaagggacagagcgtgcgatgcgttttgcctttcaattagcagaaaaaagacgaaagcatgtgacgagtgcaaccaaatcgaatgggatcgtccataccatgcctttttgggatgaagtgtttcaagacgtagcaaaggattatccagaggtggcagcagactctcagcacattgatgcgctctcagccttctttgtaacaagaccagaaaaattcgatgtgattgtggccagtaatttgtttggtgatattttgacggatcttggggcagccattatggggagtattggcgtggcgcctgccgccaacatcaatgtaaatggcaaatacccatccatgtttgagcctgtacacggatcagctccagacattgcgggaaaaggaatcgccaacccaatcggtcaaatttggaccgctaaactgatgcttgatcatttcggagaagaagagctgggtacgcaccttctcagcaccatcgaatcagtcacagcagacggctttttaacagcggacatcggcggatcctatcaaacacaagaagtcacaaacgaaatcatcaaacgattgaagaaataatccgtcattagaaccgcatctccacgtctgctataataaaaggatggatagaagaaagagatgtgaaatctagtgtcaaaaacagttgtattagcagagaaaccttcagtaggacgtgaccttgcgcgtgtgctgaagtgtcataaaaaaggaaatggttttttagaaggagatcaatacattgtgacatgggcgcttggccatttggtcacactggctgatccagaaggctacggaaaagaatttcaatcctggcgtttagaggatttaccaatcattccagagccgcttaagcttgttgtgatgaaaaagacaggaaaacaattccaagcagtgaaagcgcagcttgcgagaaaagatgtcaaagacattgtcattgcaacagatgctggacgtgaaggggagcttgtcgcaaggtggattcttgaaaaagcacatgtgaaaaagcccttgaaacgactatggatctcatctgtcacggacaaagccattcaagaaggcttcaaacgattaaaagacggcagagaatacgataacctgtatcgctcagcagttgcacgtgcagaagcagactggattgtcggcatcaacgcaacaagagcgctgacaaccaagttcaatgcacagctttcctgcggacgggtacaaacaccaacgattgccatgatcgccaaacgagaagaagacattcagcaatttcagccgaagccgttctatggattgattgcacaagtagatggactgactttgacctggcaggatgccaaaacaaagcaaaaccggacattccaagagaatgtgatcaaagagcgcttggcagcatgcgaaggaaaaccagcagtggttgatgcgttgaaaaaaacagcgaaaaaagcttttgcaccgggcctgtacgatctgactgaattacagcgtgatgcgcataaacgctatggcttctcagcaaaagaaacattatctacgcttcagcgattgtatgagcagcataagctcgtgacatatccacgtacagattcacggtttatttcagcggatatcgttcctacattaaaagatcgtttaaaaggaatgaacgtcagaccatatgcgcagcatgtgaaccggattttacaatcaggtgtaaaagcgcacaaaggcttcgtcaatgatgcaaaagtgtcagatcaccatgcgatcattccaaccgaggaagagctgtatccaggtgcattaagtgataaagagcgtaaattatatgaccttattgccaaacgattccttgcggtactcatgaatccttttgagtacgaagaaacaacggttatcgccaaaataggcagtgaaacgttcacagcaaaagggaaaatcgtgcaatcagctggctggaaagccgtgtacgatgattcctatgaagaagaggaatcagccgaggtggatcaacatttgccgctgctttcagaaggacagtcactagacgtacgacagctgaaagaaacaagaggagaaacgaaacctcctgcacgttttaatgaagcgaccctattatctgccatggaaaacccagcggcatttatgcagaaagaggaaaaagacttagtgaaaacccttggtgaaacaggtggtctagggacagtagcaacaagagcagatattattgaaaagctgttcaatagcttcctaatcgagaaaaagggcaaagacatcttcatcacatcgaaaggaaagcagctgctctctttagtgcctgaagacttaaagtctcctgcgttaacagcggaatgggaacaaaagctttctaaaatcgcaaaagggcaattgaaagcttctcaattcatgagtgaaatgaaattatatgcgaaacaagccgtatctgaaatcaaacagacgaaccagacctttaagcatgacaatgtcactggcacccattgtccagactgcggaaaactgatgctgaaagtgaatggaaaacatggaacgatgcttgtttgccaggaccgggaatgcggccatcgtaaaaatgtggcgaagaaaacaaacgcacgctgcccgaactgtcataaaaagctcgagctgcgcggagaaggcgatggcaaaatctttgcttgtgtgtgcggccatagagaaaaactgtctgtcttcgaaaaacgcaaatctcaatccaatcaaaagaaagccagtaagcacgatgtgtctaaatatttgaagaaacaaaagaaagtggaagaaccaattaataatgcactagctgaacaattaaagaaattaaaattagatcaatagttttataaaagcccgtgcggaaacgcatgggttttttagttttaccgagcatatcgatatattgtttttctgaaaatgggaatgaatgtgcgaaaagactcgtaatttggtataaaatatttatttaaatttatacaaaaacgctctataataaatcgttagatgcttagagaacggggagttgaaaggggacacgaatgcatacacgcatatatcgtacagcaattgttttactcattgtcattctactaggcggatgtacctggaaacagcagaaagaatcagctgatccagtatcaacacagcctgttttgcctggagaatattttatcactcaccacttaatgacagatgaaggcttgattcgtacctcttttgcagaggaacatatctacttatctgaatcacttggactttggatggattatcttgttcgaaaaaaagatcaaaatttatttgaccaacagttgagtgttttacaagatcaatttttacttgaccatcatcttctcagctggcaaattgaatctgaacaaaaaagtaaggccaatgctttagttgatgatttacgtgtagtggcggcacttcaaaaggcaaatcgtttgtggaagaagtcagcgtatcaaacgacagcaaaagaaatcgctcaagcgttaaaagaaaaaaacatgttcaaaggcatattgtccgattactatgatgcatcaacaaatcgaacttcacacacaatcacactctcttatatagatccaaaagcaatcaaagaattggaatccctccaaatattcacgaaacaaatgaccagtaaccaattagccattctaaaacaagcaccgagaaaaaaaggattctttcctaagtcctatgacataaagaaaaaaacatattcattcgaccaagaaattaatatgatcgatcaactttatacagctttacatgcacaccatgcaaaggtaaatacgtccgagatcatgaaatggcttaaaacgtcgtttaaacaagaaggaaaactgtacggaagatacaaactgagcacattgcagccatctgtcacatatgaatcgccttcggtatatgcactcgtcattttgtatgcccttaaacaaaatgagctgaaattcgcaaagactgtctatcaacgcatgaaagaattacaaacccaagatcctctcaagccttattacggaggatacatgaacgaaaaagagacacactcatttgataacttattgcctctaattgcagaaagggagctcctaaatgaatcggttgttcagtaacacgtatcgcttgtactattctctgctcctcacgtttgcaggccttattttgtttatgggctaccttaacgtacaagatgcagagagctttatgatcatcgcactgacatttgtcgtgttaggctgcggtattttatttggtatcctaccagcattaattttcaccttactgattttgttctttataggaagcgccatgttctttacagagcttggccatgaaaattcccttttttcaaatcaaacattgcaagatgtagtgatttggggcgtagcacttctttttttcgctatttcagcgggaagcttgcatgaacggattaatacgctgcgtcacaccattgaacaacaaaagcaggccatcaaacaatttgtggcgattgactcgacaacaggatttgacaatgctgagcggatgaagctcgaattgtctgaggaaatgaaacgggcagaacggtacaaacagccatttgtctttatccttcttcatatgaattacgcagcggaattcaaatcgttatatggagaaaaagaaatgcagcacctatttcagcaattaagtctcaagattcgtgaaagcgtaagagaaaccgataagaaatttcgattatccgaagagcgaataggcttgctgttaactcatacaccagaagaaaatgtgtcagttgtccttgataagctaaagggtaaattgcaaacgcatgtcctattaaacggtcgtgaagtgaccttgacatttcatgtctgtcatttaacaagcagctcggattatcgtacgccacagcagtttttaaaagaactagaaaaagagatgatgatgaatgaactgtaattctttgatgaaatgttgtttgatgatcacgctttttacgattctttcgtttaaacacattacttcagccgatgctcttgtcacgcagccaaatacactgatcgtttattccacaccatctggggaagtgactccagccgttcatatgctggatctactcgccggtcatttttcaaaacagacgacgattgtatccgatgaacatttggctgaaaagaggatcaatgaatttcagcaagtcatttatcttggtgaaataaagagaaccttgtcaaaacaaaccattcgtgcgatgaacgaatcacagcaattcatcgccattggatacaatgcggaacagcttcgcccattctccaagcttacttttcacaaacaagatcatatcagtcaattgaaacatacacatgatcagacataccgtcagctagagagaagtatcaatgtgttaacggttcgaggggcggacttggaaaatgaatttctagtgaagaaacgtcaatctgatctgccatttgtgactcaaacaaaagaaggtgcagcatatatcggtatcttagatgtcatgcagcacaacaagcttcttgcagaagtgctagaaaaatacatgccatcttctgcgcaaatggcgacaaaatacttaatgctcgggaacatcagcccagcaagtgatgagaaaaagctgcttgaacttggacaatacgtatccgcacagcatattccttatcaaattgaagtgacccctgtttggatagatcgagcaacaggtgatgaagtcacactgagtgaccgcccgaagctcgtgaatgtgttaaaacaaatgcaagaaaatggagcgagtatcattcttcatggctttagccgtacgtatcgaacggaggaatctggtcagggatttgagttctgggatgcaaaatatgatcagcccatcgcgtcaaatgaccccaaaaaagctgagaagaaacaaagtaaaagccaattcccaaatgaaaaagactttcatacgtataccaaatcgtatcagcagcaagaaatcgcctatacagaagaaaaactgacaaagggcattgagcttcttgctaggcaaggcttatatcctcttgcgtttgaggtgccgcatgatgcgatatcacaacaagggtatgaagtaatttcaaagcatgtgtccagtctatttggacaggtgcagctgtcagaccgcacttggaaatcagtcagcgcatcgccgcttgtgacgtctcctgccatgttacatggcatgactttatatcctcagcagcaagttgagcaagcgtctaataaagaaggttcaaatgttttaactgaacagacgattcaatccgtgcagcatctgcaatcagccgcaatgggcctgtcctatgacatggagttggggctagcaggattacaggatttgatcacacagatggaggcaatcccttctagcgaatggctggatgtaaaaaaaacaaaacagacggtccaaactgcacatgtaaaaatccaaacatcacggaatggacatattcaagtagaggaatccaacatcgccgaaacaaaaacaatcaaacgaagtggcatggaaaatatgctgcgaattcttacagtcgtggtgatgctatttattgcggcatttgctttatacacattgtatttaagactgacaatgaaaaaacgaatttttaaggagagaaaattaggtggctgatgtcttattttatctttcattactactgatttggactatgctcctataccacatgtttctcatgcagggcggctttcagcattacctcacctatgaaaaagtgctgcctaaatggacaaaacaagggaaagagctgccaaccgtcagtatcctgattcctgctcataatgaagaagttgtcattcggcagacgttaaaagcgatggtccagctatcttatcctaaacacctccttgaaatcattgtgattaatgacaattcctctgatcgcacaggagatattgtgcaatcattcagtgagcaatatgatcatgtccatatgattgaaacgaagccgccatttgcagggaagggaaaatctactgcactgaatgaaggattgaaggcttcgacaggagaagtgatttgcgtatacgatgcagataacatgccggaacaaaaggctgtctatcatttggttcttgggttattgaatgatccaaaagcaggcgccgttgtcgggaaattcagagtgatcaatgcagcccaaaatttgctgaccaaatttattaatattgagaccatctgcttccaatggatggcgcagggcgggagatggaagtggtttgggattgcgacaataccaggcaccaacttcgctatccgcaggcacattttagaagaactcggcggctgggatgtccaagctttggccgaggacaccgaattaacgatccgtgtgtataaccttggatatgtgattcgatttttcccagctgcgatcacatgggaacaagagcctgagacatggaaggtctggtggcggcaaagaacgcgctgggctagaggtaatcaatatgttgtactcaaatttttaagacagtttatgaagctgaaacgaaaacgaatgattttcgatttgttttatttcttctttacgtatttcttatttttcttcggtgttctgctctcaaatggcatctttattgtgaacctatttgttgaccttcacttatctgtaggggctgtcgcactgatcctgtggggattagccttcttcctctttctaacagaagtgatgattacattaagtattgagaaaacagagctcaccaaacaaaacattctcattgtggtcctcatgtacttcacctattctcaagtatggattgcgcttgtcgtgtactccttatgtgtagaggtgaagagccgattattgaaacaagaagtgaaatggtacaaaacggagcgttacgatcaacaacaaaagaaaagcgggtgacaaattgaaatcggtcaaatggatgatttttatattagcgctatcccttgccattcagccttttttcatggcaagtcaagcaatggcgcaatccaatcgagtacaagtgaaagacgattgggttcgctcatcgaaaggaagtcaaacagaaacgcagcatctatcagaagatgtggtgaccttgtatggacaagaagaccgcactgaattttcctatcaaatggagaaagaaaaagtagagtctagcactcttacattaaatatagaggcttcaccattactcatttcgccatcgtctttcacagtgatgatcgatggagagattgaaaagacaatccctgtatcagggaaaaaccaaaaaaaatcgattcaaatcaaattgaacaaagcgcaattgaaaaaaggatctcatcaaattcagctcgcattttatggtgtgttaaaagaaggtgtgtgtatcaaccaagagacacctgccaattggctgaaagtatatcctgaaagtgagctggcgttcaaaggagctcaaacgaaagacgtgacgttagacagcttcccttcaccttttattccatcaggtgagcagaaagaacaaacagatattgtgattccaaatacaccggaagcggctgaattagaagcggctatgaaaatctatcgtacgttgaaaaacaaagaccgtctagcagacctcaaactcgttcaagaaaaggacctcaagcaaattgcgcatccaaccattgctgtgggagcaaaaggaagctggaaaggacgtatgaaatcgatcgagcaagctgcgggcattaaaacagaaagcaatcaacttacgttagcggtgagaaccctgacagcaaagaaaaaagaacagcccattttatttgtctctgctgaacagccaaggacaattgctgaaaaaatcaatgtcctgactcaaccagaactgacgggtcagctcactggtatcgacttgctgctacaaaaggtgacagctaatgcttctaagccatcgcatcatattcgtttaatagattttggcggagatgatgtcacagttggaaccaaaaagacggcatctgatcactactattatccgaaagcattaatcgctcaacaaaaatcaggtgcaaaactaaatctatcatttaaaaaatcggatccagcgaacaaagcggaacgtctaacagtgatgatcaataacgaaccgcacgacataccgttaacaaaactaggaaacaaagatgagaatggattctatcatgtgtccattccagtagactcgcaagtacttcaaaagaacgagtatgtggacttgcaatttgtcacaacgggttttaaaagcatggaatcgtgcagacatacggatgaagaaggctggatttacattgacaagaacagctctcttcaaataccagaaggaacaaatagtgatacaccggatttagccgcatggccgcttccttacacttcaaaaacgcagcaaggaaacacattgatcatcatgccagatcaaatcaagcaagcaacgatcaatcaaatggcgatgctgacagaatcatttagtcagccggaagctgctcaatatcatttgatcaaagcatcgaatgtgacaaatgaacaattgaaaaagaactctctcattttcatcggtggcatccagacattctctcttttaaaagaaaaagcagacgatctcatcgttccggcgaaaaaaggtcaatatgatgtatcctcatttggcatgatcaacgaaacaacagctcgtattgtatggacgcagccatctgtatggaataaagaacaaagcatgaccgtttttgcaggaatgacggcagctgacgctgatgtatcaaatgaagtgatacgtttccttcaaacaaatacggagaccgcaacagttgcaatagaaagcaaaaacaaagagatgttctctaatcaccaaacagtcagcagcacaacaaatgatctgaaaaaaggtaaaaagcaaggcggtggtgagtcttggatttactttgcgtgtatcgctgtactgatcatttttgtggtgatgatgattgtttatttcgtacgaaaaaaccgcaaaaagactgatgaataaacggtcaaaagacctcgaaaaaatctctttactttggtgtcaaacgggagtatgatctcttttataaaagaccaatcgctgaatcatttcgatgagcgggggaaccaattgtggtggaaagcaccacgtggggtgaatcctttttaggtagggcaaagtctcatgcgcccgaatccgtcagctaacctcgtaagcgttaaagagagcaaagaccaacctgtgatctaaacaatagacacaggggcattctattgcctctgtgtctttttggcgatccatcttttgtaacttaaatcgtttgacactaaaggagcgggcatcacatgtacagtttgatgaagcgtattttaattggtaaaccattaaaatcacaggcagcaggagaacaaaaactatcaaaaatcaaagcgttggcattattgtcatcagacgcattgtcatcagttgcatacggtacagaacaaattttaattgttctttccgtggttagtgcagcagcattttggtactcactcccgattgcaggttgcgtattaattcttttaatggcgttaattctatcttaccgccagatcatttatgcttatccagaaggcggaggggcatatgtcgtctctagcagaaacttaggtgaaaaaccaggattgatcgctggaggatcattgcttgtagactatattttgactgtagcagtaagtatatcagcaggtactgatgccatcacatcggcttttccagcactatatccatatcatgtcttgatctcaattgtattggtcatcgtaattatggtgctcaaccttcgtggattgacagaatcggcatctattttggcttatcctgtctacttgtttgtattttcactccttatattaattggagtcggcggatttaaattgttaacaggcggcgtaccgccagcacctgagcatgcagcggtaggcacacacgtacaaggcattacattatttctgttattaaaagctttttcatctggctgttctgctctgactggagtagaagccatttcaaataccattccatcctttaaaaaaccagctgctcaaaatgcagcaagaacattattgatgatgggtggattactagccgttttatttgtgggagtcacattgcttgcgtttggttttggcatctcgccaaagccagaagaaacggttgtatcacaaattgcatcagacacttttggacgtacgtttttctattacgtgattcaggctgtcacagcgctaatcttaatattagcggcaaataccggcttttcagcctttccattattggctgtcaatttagcaaaggataaatatatgccgcgtatgtttactgtaagaggagaccggcttggttactccaatggcattatctttttaggcgtagcctctatgctgctcatctggttgtttgatgggaaaacagaacacctcatcccgctatatgctgtcggtgtgttcattccatttaccctgtcgcagaccggcatgtgtgtgaagtggattcgagaaaaaccgcagggctggaaaacgaaaatgccaatcaatatcgtcggagcactgatttcttttacagttttcatgatactcattttgaccaagttccatctcgtatggccagtattcgttttcatgcctattgttctatttatctttcattccattaaaaagcattacctgtctgttggagaacaactgcgtttattgaatgaaacagagcctgttgagattaaagggaatgtggtcatcgtaccgatagcaggtgtaacacgtgtcgtcgaacaatctgtccaatatgcaaggtctttgtcagatcaagtcatagcggttcatgtatcctttgataaagaaaaggataagaaaattgaagaggattgggaaaaactaaacagcggtgtacggcttgtgatgctgcattcttcctatcgaagcctcattcacccgcttgataaatttcttgaaaccattgaggcaaaagcaaatgcacatcaatataaagtgatggtgctcgtgcctcaatttatcccgaaaaaaagatggcacaccattttgcataatcaatctgcctttttattaagattccgcctattatggaagcgtgatattgtggtggcgacccttccatatcattttaaaaagtagcaaaagcaagttgaaacgtttgatcaaaaggatgcggtggtatggagtaagaaaaaaggagttttctcacatgccgcaaagaaccgcaggaaaagaagtaacagcgctactggaagagtggggcgtgaaacatatttatggaatgcccggcgacagcataaacgaattgattgaagaacttaggcatgaatcaagccaaatacaatttatacaaacgagacatgaagaagtggcagcactttcagcggcggctgatgccaaactaacaggtaaactcggtgtctgcttatcaatcgctggaccgggtgctgtccacttattaaatggactatatgatgcaaaagcagatggtgcaccagttttagcaattgcagggcaggttgcttcagccgaagtaggcagagacgcattccaagaaatcaaattagagcggatgtttgacgatgtcgctgtctttaatcagcaggtacagacagcagaagcgctgcctgacttattgaatcaagccatcaaagcagcttatacccataaaggtgtggcagttctcaccgtatcggatgacttattttctcaaaaaattaagcgtaaacccgtttatacatctcctctttatgtggagggagaagtacggccaaagaaagatcaactgctaaaggcagctcagctgattaacaatgcgaagaagcctgtcatcttagcaggtaaaggattaagacatgcaaaagaagagcttctttcatttgcagaaaaggcagctgctcctatcgtcatcacactccctgcaaaaggggttgtgccagacaggcatccatactttttaggtaacctaggtcaaattggaacgaagccggcatatgaagcgatggaagaatgtgatctcttaattatgcttggaacctcctttccatatagagactacttaccagaggacacgccagccattcaactggatattaaaccagatcaaatcggtaaaagatatccggtagatgtgggaatcgtgagcgacagcaagagtggtttacatgaactgacttcctacattgaatataaagagcagcgtggttttcttgaagcttgtacagagcatatgatgaagtggcgagaagaaatggataaggaaaaatccgttgctacttcaccgattaaaccacagcaagtcattgctagactagaagaagcagtcgaagaagacgccattctttcagttgatgttggtaatgtgacggtctggatggcgcgtcattttgaaatgaaacagcaggatttcattatctccagctggcttgccacaatgggctgtggtttacctggtgcgatttcggctaagttaaatgaaccgaaccgacaagccattgctgtctgtggtgatggaggcttcacaatggtcatgcaagactttgtgacagctgtaaaatataagctgccgatcgttgtcgtgattttaaacaacaacaatttaggaatgattgaatatgagcaacaggtaaaaggaaacatgaattatggtatagagctggaggatattgattttgctaagtttgcagaagcatgtggcggcaaaggaatctccgtgtcatcacatgaagaactagctccagcctttgatacagcccttcaatcggataaaccagtcattattgatgtcactgtcgccaatgaacccccgttacctggaaaaatcacgtacacccaagcagcaggcttcagtaaatatttattgaaaaaattctttgaaaaaggtgagctggatatccctccactcaagaaaagcctcaaacgctttttctaaacacaaggtagtcggtcttctgaaaagaaggctgacttttttttgtgatgattagggaaatcatttcaattgtcacttgccttcatctctattaaaatatttggaaattaattttgtaacttaaagcctatttttccaattcgatgagaaaggtaaaatagactttatgatcaataatggagggagtgacttcttctgggcaagatacttgatgcaaaagcactaacaagtgccacggacacaagggcaaaacactaccaggaactccgcgaacaaatggtagatttaaaaaaagcattacaaggtgtttctaacctcggtgatgatttcactggaaaaggcgccgacaacattaaaagcttttataaagagctggctggaaatgtagacatgtttatcagcttcattgataagcaaaaggcctttcatgaaggtgtttctgggacactcgatgatacaaactttggcggcgataccttcgtagaagaacactttttagacaacgcagtacatatgggcatcaaaaacgccaaaagcattgtaaaggatcaaaaaaaggcacttaaaaccatttttcaggacattgatgacctcatttctctagaggtatttgacagcaaaacctttgatgaaaaaattgcaaatgcagaagatgaacgaaaaaagacagtaaaagacctaagagagcttgatcaaaatttaaaagatgaatatgctttgtcagaaacggagcagcaagctacaatggcattgtacaaagaaatgatgaatgccacaaatgacggaaaagcgatttcgcctatgaattttgacaagaaagcgtatcaaaatagcgaaatctacaaggcaaaaagcgatattgagaagcaaacttctgaatatctcaaaatcaaaaaagaacaagaagaagctagagaaatcgcaaaggaacaagaagcactcgccaaccgcccttggtatgaaaaagcactcgactatggcggaaatatcgtgaatgaactgactggtgtaaacgatgcaaaacgcgccgcaacgggcgttgacccggtcacaggcgaagaacttaccgcaggacagcgcgtcgccgcaggcggcatggcagcagcaggttatatcccaatcgtcggctgggcaggtcgcattttcaaaggcggaaaagctgtttataaaacaactcaagccacctcggccgcagtcagagcagtcgatatttacaagacatcgcaaaagtcttttgacgccttaaaaacatcgcaaaaaggcttatacggcctcaccgccaccaacggattcagcgaagcaattacaggtagagacatgtttgggaataaggtctcgaaagaacagcaggaagcgagcatgaacgcggcgctgggaatgcttttgccgtttggggcgaaagggtttcatgggaagatgggggttaaaagtactgctaaaaatgtagataatggtacagtgtggaggaatataaaagttactcaaccactttatgaaggtacaaaaatcccaaaatcttttgaattagcaacagttgatggacagttctgggtgcaccctaatggaacaaaacatatggttgagtatataactagagatgcaactacacatggtatgccgataaatagtcaaactttattgtcgagtttccaaagctctgttaacaatgctgctaagcaaggaattaaatatgaagaaattatgaaggtaggtaattgggaattaatatttagtaaaccccggggagacggattactaccagtaataaagcatgctgtgtatatgccttaaaaggagaaatgatgatgttaaaagtaatagattataaagacagtcaacctataaacattgaatatgatctttatacaccgattaatatagaatttggtagttggaatatatcaaaagagccaacgatatattggagaactggagatttcaagaaatctttaattgaaataggtttagggaaatatacaggtaatattcgttcaattacactaacgttaagtgaaaatgtacacaaaatggaaagtttgaaattagatatggaagatataaatatggttaaaggtgtaccgagttttcagatagaagaatctaatgataatacctatatagacgaaaaaggtaaattagacgtatatatagggaaggatagggtattaatttcattctcagaaaatgatgcagtgtctattttacaaaatgatacagtaggatttgttttggataaagaagaagtagtttgtggtattctcataagtggtatgttagaacatgaaaagaaaacattagaagatgcattgaattagagtgttatgaaatacaaaaaccttaatggctaaatgtctttaaaggttttttgtgtttatcggagtttagaaaatgattcgatagtgatgaatagggtgaaggaactttgatttattaaaagaatctttggaataaacgtcacatacaaaactaatggtttatattatttcaaaagatcaaatgaattatcagttaaaaaagcttaaaatgagaagaaatcaagtagaaatcattacaaattgaaaaggagaaaaaaccatgctatggatcctcacacaaaaccaacaaactctgattcatgtccaagaagtctcagtaagcggcaaaaaaattgaagggatgatcttgggaagtacttcttgggcaaagatgctcggcaagtatgactcaaatgatcgcgcagccgagatcctgcaagacatgatgaagacgattgaagaacatccaaatgccacgatgacataccgaatgccacttcaataaaaaaaagaaaccaccttttcatcgtgaaaaggtggtttttgtttaggatggtgtttttccaaaggctaagaataaagggatgcctgtgccgacaagggttgtggcaaataggaacataccgcaaataaatagaaaatggctggctgaaaagacgagtgccagaatgagaaaaacgatgctgagtcctaccatgctataggatgggacaaagcggcgtttgtaggtggctttctttgttaggaatgagaagaaaataccaaataccaaagggacaatccataagtaaaataaaataataagagacatacatcatacctcgatttttccttctattttatcagatgccgatcacaacggatactacaaagcttcactttgtaaaataattcatgcaatcgacacaattaagtaggctgattcatcgaatacgttttttgtttcatatattcaggctgtaaaagggcgtacacacaatgatcggtaaagcgattgcccagccattcacattgccttaatattccctcaagcgaaaaggataatctctctgcaatgcgtctgcttttctgattgtcgacagcagccctaatctcaatacggtgcagtccgcactcttcaaataaatagcgaatgaccgcttggcaggcttttgtcatgatgccttttccttgatagccttctccgagccaatagccgattgaaacggtcctattgatccaatgaatttgatgggtgccaatgatgccgacgagttctccatgtgaccagatgcccgcttgaaaaccgttgttctgcatcgcttgctgcatggcgccttggataaacgccatactgtcttcctctgtctgcgttgaatccacccaaagcatccattcacgtaaatgctctctcgaccgctgaatgagcaaatacagacttcttgcgtctcttggctcaagcagccgcatggatatctcttgatcctgataaacaaacatgaacccacatcctctcaggggaattctaccataaccaaatggaaagaaaaagacagctcaacactgtcttttacataaacgtatctacaattaagaaaagattaagtgctacaacaagagctgctatcacccaagatattcctgtcacccagcgggcattcgttaattcgcccataattcgctttttacttgtaaataaaatgagcggaattaaagcaaaggcaataccaaaggataagacgacctgactcatcacaagcgcggaggtcgggttcaccccagatgcaatgatcgcaatagggggaatgatggtaatcagccggcggacatatagcgggattcggtattgaataaagccctgcataatgatatcgcctgacagtgtaccaacagaagagctggatagtccggctacaagcagacctacaccaaataagatggctgatacaggccctgcgagtgtaccaaaatgctgaaacgcaacatccagatcttcaacaaagagaccatttttataaaataaagcggctgccacaatcaacatgctggcattgatggccccggcgactatcatcgcaatgaggatatctaaaaactcaaagcggaaaatctgctttttctccttttccgttctgccgacgactcttctttgggttaaagctgaatgtaagtagattgcgtgaggcatcacagtggcacctaaaattccagctgcaagcagcacgctgtctgcgccatcaaattttggaatgaacagtccgccagcgacacttgcgatatctggtttggcgacaaaggtttgcacagcgaaagcgatcacgacaacgaacagcatgcctgtaatacctgcttctaatgctcgatagcctcgtctttgcagctctaatatcgcaaatgaaccgatagcggcgataatagatgcttcaagcagagggattcgaaaaagcaagtataaaccaagtgccgccccgataaactcagctaaatccgtggcaataatgacgagctctccctgaatccataaaccgattgaaacgggttttggaaactcttcacgtgcgatttcaggtaagtttttacctgtcgcgattccaagctttgcggataaggactggatgagcaaagccatgagatttgatatgagaatgacccataaaaggagatatccgtatttggagccagccgcaatgttggtggcgaaatttcctggatcaatatatgcaatggctgcgataaaagcagggccgagaaaaggaaggagccttctaaatcctttgacctttccttcaagtgcacgctcagctgccgctgacatgtgtgcctgtgcctcgatgtatttgtttgtcatatgtcatcacctagattctacaaaagttttgctttggcacaaaaagtttccttgatgcaatttttaatcatcatatgcccatcttcatgaaaagtcaactatctgaactaataggtttgtttatcatatgtaagtgaaaaaaatagataccttgtcaatccatcacataaaaaacaccgcctcttagacggtgtccctactgcttcctctgttattcgttttttttaagatacccttgatcccacactacggaagatcaggcttaagataatgacaaagatcgctgctcctaagattgctggaaagatcgcaaagcctgccagactaggaccccacgttccaagtaatccatgaccaatccaagcacctgcaagcccggcaatcattgaaccgatccatcctcctggtacactacctccagcgagtgcactgccaataaggccgatgacaatcgccacaactaatgaaatcagaaatcctaacatgttgatcactcctctttttgtttgtgtattaagcaataaccgttttgaaaaagtttcaaacctttcgaaaccgcttcaatgttctatacgtatgatgaacaaggattgtgtataataacaaacaaatacttgagcggcatctaaggaggcaaatggcatggaggaaagagagtggctaaaagcacaattaaaggagattgaacagtgggagaaagaccagcaaaaggtatggttttgggagaaactcagccgccttccatttcaaatgctggacaagctgacgcctgcctttattcagaaaaaaattggtgtactgctagatgaaatggggcattacattcaatcaggcggtgcctatttgacatcagaaaaaggcatcatccatcaatttcaaaagaaatgtgctgatgattccattcagcgcatagaagatattgaaaaagctcctattgaaatcatggatgccattagtgaacatatggggaaaaacaggacgaacctcgccacggtacaaggtgcgacaactggtgtcggcggtatgtttacgctggcagcagatattcctgcggtactgggtctttcccttaaaacattacaggatattgccgtcacctatggctatgatcctaaaaacaaggaagagcgggtcttcatcataaaatgcttacagctgaactctgctgatgtggtggggaagaaatctatattaaaagagctgaggagctatcaagcttcagaaggaaagcacgaaaacatgatttcccaaatccaagggtggcgtgaagtggtgtataattaccgggattcgtttggctggaagaaactgtttcagcttgttcccatagcaggcattttgtttggcgcagtctccaaccgctcacaactaaaaggtattgccgaaacaggcatgatgcaataccgaaagcgaagaattgtcacaagattagaagagctcacgcagcaagaacagagtgaatctggtgcataaaaatccctttctcaaagggattttttatttggtctcatcctcatcttgaaaagcatggataggagaatgttcataacgcgcacgcagctcgcgaatctgcttgattagggtggaaccaatggttttttcggcttcctcatacaaaggatcgagggctttcacccatttttgtctttctgctggcgtcaattcatgaatggcaatcggcgattcccgtttaatgtcctctagctgatctttgttcatctgttctgcatgtttttcattccaagctgttgtttcttccatggcttcaagtaaaattcgtttcgtttcaggtgtctggcgttcaaagaaggattgatctgttaagaccacatagcccaaatacccgtgattactgatcgtcatatagtcttgtatatgatagaatttttttgaataaatatttgaaatggtattttcttcaccgtctactttttttgtctctaatagctggaacgttgaattaaacgattcctgatagggctttgcgccaagaagtttgaattgtttttcaatcatgtcgctttgcataatgcggagagattggttttttaaatcaccaggctgtttgataggacctttattagaggtgatttgcttaaagccatttgtccaataggccattccctttagcccgtctttttgcagggtgccaaacaatctttggccaattgcaccgtgtaggccttcttgaaccgcatcataattagaaaaagcaaagggaaggtcaagagccagccactcaggggacagcatgccgagcttcgaggtagacggggcgataaattgaacttgattctctttaagtgcattaatttcttctatatcagaataaagactcccgttggagaaaatctgaatgctgatcttcccatcggatttttcgtgcacaagctcagcaaatttctttgcggcaagtccttttggtgtattatctgccacgacatggctaaatttgaacacaagctgatccttcagccctgtctgttcatcatcaaaggtcgtcgctgattttggcatcatatgataaaaaccaaagtataaagcggttacaaaaccgattatgagcaatagtgtataggcgagtaaattcttcatgcgtccgatcccccttatgtcaagcatacttgaccgaggaagaattcgtaaagatacaggtgaaaaaatgatgagaaatcgattgaaattacaacaattatctattagatggaagctcaccattctcacatatttcgttgtcattttcgcccttttaatcggaggaattgtccttgttgggggaatccagcaaacagaggaacgagagcttcgaaaaaggctcatgaacacggcgagaacagtggctgagatgaatgaggtgaagcaggcgttagctgatcaaacaaaggaacgtaaccgattacagcatgccatcgaagagattcggattattcaagatgctgactacattgtcgtcatggatatggatcatgtgagattaacgcatccagtaaaaacaaggattggtcagcgctcggaggggacagatgaagaacctgcttttgcagagcatatttatttctcagaagcagagggagagcttgggacagccatcagagccttttatccagtgaaggatgatcaatttaatcaaacaggggttgtccttgtagggagaacgctgccaagtatgatcgatatattaggagaaatgaagcgggatatcctcatgatccttctgctgacgctcagctttgggcttgtaggctcatttttgctcgcccgtcatattaaacagcaaatgtttaagctggagccgcatgagattgtcagaatgctagaggagcgcaccgcaaccttccactctattaatgaaggggtcatcgccattgataatcagcacatgatcaccatttttaatgaaaaggcgaagcaaatttttggtgtgacaggggatgtcgtaggccggaatatttgggatgtgctgtctgacacaagactccctgagatcattgatcgcgctgaacccgtttacaatgaagaaattcatatgagcggaaagcggattatgagcagccggattccgattgtcatgaaaaagaaaattatcggagcggtcgccatttttcaggaccggacagaagcggcaaaattggcagaggagttaaccggagtcaagaactttgttgacggtctgcgggtgcaaaaccatgagcatatgaacaagcttcatacgattgccgggctgattcagcttggtaaacccgatcaggcgctcgatctagcctttcaaacgacggaagaacaggaacatgtgatggactttcttcaccgcgtcattcagcatgatgccgttgcgggattattgatgagcaaaatcagaaggggcaaggagctaggcataaaggtcgaagtagacgaacatagctgtctgcgtgatttccctgagcgtctagatcagcatgatatgacgaagctgcttggcaatctgatcgagaacgcctttgcctcgtatgatactgtagaaagaaacacaaaacgcatttctattagtattgatcaaaccgaggttgtcctcgcgatgttaattgaagacaatggctccgggattgaagaggaaatgattccttatattttcgataaaggtttcacacacggcaaagaaggcggaacaggctatggcctgtatattgtaaaaacgattatcgacaaaggaatgggaaatgtagaagtcacatcaagcatcggcattggtaccaccttctcaatcgaattcccaatgacaatagaggagagagacagatgactcagattaaggtgctattaattgaagatgacccgatggtgcaagaagtgaataaagagttcattaagagtgttcctggctttcaagttgcggcagtcgcaggtaatggggagcagggcatccagctgatcaaagaaattcgtccagaccttgttgtcctcgatgtatatatgccaaaaaaagatggcgtgaagacgcttcaagacattagaaagcaaaagatacaggtagatgtgatcgttatttctgcggcaaaggacaaagagaccattggcatcatgcttcaaaatggcgcacgagattatatcatcaagccgtttaagttcgaacgtatgaaagaatcacttgaaaactataaagcgtttaaatctaaaattcgcacagcagcagaattttctcaggagatgctggatgatatcatacgaaagcctgctgttaagcaggaggatacttggctccctaaggggctgaatgtgcatacgatgaatgaaattaaagcctatatgggcttgcaggaaggcccgcagtctgcagaggaagttgccaatgcactcggcattgcccgtgtcacggcacgccggtatttagacttcttagtgaaagaaggcgagctgaaattagatatgcaatatggcggggttggccggcctgtcaataaatatatcgtacattctgactaatagaccaaaaagaccaaaatgtacgatatgtccataagcttcacagcctttggtgaaatcgctatcatttagctacagataacagttaagcgtttacatcaaagggtgagggagttgattttttatgaagaggcttttgaagaacctgacatttcaggtaattgcagctgtcattatcgggatcattgtcgggatggtttggccaaacgtcggaaaagaaatgaagccgcttggtgacacctttatcaatgccgttaaaatggtcatcgcgccaatcattttcttaaccattgttcttggtattgccaagatgggggatatgaaaaaggttggaaaagttgggggaaaagcatttatttattttgaagtcgtcacgacgcttgctttggtcatcggtctttttgtggtaaatatcatgaagccgggtgcaggtctggactatagcaagcttgaaaaaggggatgtttcacagtatacccaaaatgggggacagggtatcgactggatggaatttgtcacacacatcgtaccatctaatatggtagatgcttttgcaaagggtgatattttacaggtcttattcttctctattttattcggtgttgcgcttgctgcacttggcgagaaggggaaaggaatcattgagtggcttgataagctgtcacttgttttctttaaaatcattggatatatcatgcgtgctgcgccgctcggtgcatttggggcaatggcttatacgatcggacactttggtttggcatcgattaaaccgctagcgagtctgatgctctccgtatatatgaccatgttcctgttcatcttcgttgtgctgaacatcatttgtaaaatgtatggcttcagcctgttcggttacctgcggttcatcaaggatgaaattttaattgttcttggcacaagctcatcagaatccgtgctgccaagaatgatggataaaatggaacgctacgggtgctctaagtctgtggttggtcttgtcatcccaacagggtattcctttaacttagatggaacctcgatctacttatcgatggctgtggtcttcttggcacaagtgtttggtgtagacttgtccatcggtcagcagatcaccatcatccttgtcctgatgctcacctcaaagggagcggctggggtgacaggaagcggatttatcgtgctggcttctacactcgctgcactacaggtcattccgctagaggggcttgcacttctgcttggagtcgatcgattcatgagcgaaggaagagccattacaaatcttattggaaatggaattgcaacaattgttgttgcgaaaagtgaaggtgaatttgacgaagcgaagagtaaaacagcccttcaagaaatgcgcaatatgaagcaagctgtatagtataaaaacaacctaaaaaccgaaaccttatgttctacatggggttcggttttttcttgtgctgaaaagaaaaaacattaaagcttgataaaattaaaacgaatcgtaagaccttattgaccttttattatataatttacagaaagatccgatataatgtatatcagatccgatgaaaaatagactttagtcctggcaggtgtgtaacgtaatggcggcattttttaaattgttcgaaaaacccggtgttaagcggttttctgtatttgtagtattagccacagccttatatctattaagaggaatgatgaatttaattctcttgaccttcatattcacctttttgatgaatcggttagaagaggtcattagaggttttttaagtcacttcctgaaaataggacagaaatcggttatcaccattttgtatattcttttggctggtggattgacgtttggcggattcgtgtttgtgccaattatcgccaaacaggtggagcagctatttcatttaggaaagaaaattgcagatcatccacaagatttacccttctttgatgtcatcaccaacgtattcggagattttaaaatatcagcttactttgagaaagggtttaatttcctctatacatacttaacagatttcagcacgttcagtatccaggtcattatgtccttaatattaagcatgttcttcctgttcgaaaaggaacgcctcattcaattcatgaacaagttcaaaacgagtaaaatctcagtgttctatcatgaaatagccttctttggacgtaaattttccagaacgtttggaaaggtactcgaagcacagtttattattgcaaccgttaactgtgtcttaacaaccattgcgctaggcattatgggattcccgcaattatttggattagcggtcatggtctttttgctaggcttaatcccagtagcgggtgtggtcatctcacttattccactcagcatcattgcgtatacccttggaggcggcatgtatgtcctttatattgtgctggtgatcgtcatcatccatgccattgaagcctacttcttaaacccgaaactcatgtcagcaaaaacagaactccctattttcttcacatttattgtgctgatcttctctgaacactacatcgggatttggggactcattattggtataccaatctttgtgtttatcctagatattttggaggtcaccaacaaggaggaaagtagttaaaaagttcatttgaacctgtttacaattttctaaaaataaggtataaatagtatgaaaatatcataataaccacacgcttaatccttctaaaggaatgggggacccactattttggggtgaatttttctctgttgagaaaaaaggacatctcttcgtcctaacccgtcagctaacctcatcggcgtgaagagagtaaacggtggtatatgtaaggacacgcagacccacgagaaaactctctcgtgggtctttttgacgaggaaggggagattttattgaagctggctacaaaaattattattgcccttattgcaggtgcaatcacgggacttttgcttaacattttcgctccaaatgtattcaaagtgttagatccttatctattcacacctctaggtcaaatcttcttaaatctaatcaaaatgctggttgtgccaatcgtcttcttttccattacacttggtgtggcaggcctcggagatccaaaaaaactaggccgtattggagcaaaaagcatcttatattttctactgaccacaaccttcgctattatcattgcgatgtctttagcattattaattaaaccgggttcctttggttcattcgatacaaaaggggcagaatacgaacctcaagaagcaccatctacgacagacactttattaaacatcattccatcaaatccagttcaatctttagttgaaggaaatatgctgcaaatcattgttttctgtgtattcttaggactaggaattgcagtgctaggcaaaaaaacagaaggattactcaaaatattagaacaaggcaatgaactcatgatgtaccttgtaggagtggtcatgaaatttgctccatacgggacatttggcttaattgtgacggctattgggagtcaaggtcttgatgccattaaagccatgggactgtattttacagtggtgttagtagcactattggtgcatttctttctcacatatggctcaaccttggctttatttgcaaaacgaaatccatttacattctttaaagacttttcgcctgcgatggtcgtagcctttagtacgtctagcagtagtgcggttctccctgtatcaatggaaaccgctcaaaagaaactgaaagtacctgagccgatttctagtttcgtgcagccgttaggcgctacgatcaatatggatgggacagccattatgcaaggggttgcaaccatctttattgcacaagtgtttggtgtggagttaacgctgatgcaaatgctcacagttgtattaaccgccgtattagccagtatcgggacagccggcgtaccgggagtaggcttgatcatgctcgcaatggtcttgaactcggttgggcttcctgttgaaggtattgcgctcatccttggcatagaccgcttattagatatggcaagaaccgttgtcaatattacaggtgacgccgcatgtgcggtgattgtgacagaaactgagaaaaaacacgagaaagacgcagcatcaccgaacctatccatgtaatgtaaaagaagggctgactcgatcagccctttttttcatgggcctcttgtcttgcgtgatatacttttaaaagaatgagcggtcttatttgccgccataggctttacatcagaaggaggaaacacgttgcagtctgctgttctaaaagtagagaaagtcgataaacgaattggtcggaaattgatcttacaagatatatctatagaaatagggaaaggagaaatcgtcggcttactaggaccaaatgggtctggaaaaacaaccttaattcgcttgatcgttggtttgatgaaaaaaaacaatggccgaatcatgatcaatggatattcacaggatgaggattttctacacgcaatgtcatctgttggtgcgatcatagaaaatcccgaattttattcttatttaacaggctttgaaaaccttgaactatatgcggcgatgcacgatggagtgacggaagaacgcatgcaggaagtggtgaaaagagttcgtctggagcacgccattcatcagaaggtgaagacgtattcactggggatgaaacaaaggcttgggattgcacaagccatattacatcagccgaacctgctgattttagacgaaccgacaaatggacttgatcctgcaggtatgaaggaattcagggagcacttgcaaatgctcgtacgagaagaaggaacgtccgtgttatttgccacacatttattgcatgaggtagaagagctatgtgaccgcatgatcatcattcaaaaaggacagatcaaagccagtgcgaagctctgggacatggaggggaaagaacagatactcatgaatattcagccagtggaaaaggcggtttcgtggctcgacacgcaggcctatacatatgaacgaaatggagcgcgtgtattacttcatttgaacaaagaacaagtgcctgagctgaacaaacaacttgttctggctgggtttgatgtacttgaaatgacgcctcaaaagccatcaattgaagaggcatttatgaaatggacggaaggcgggacggcagatgcttcaactcatcaagaatgagcataagaaaatgatgaggaaaaagatcacattcattgctcttggattgatcgttgtgtttcaattggcgatggctctagcgttgaaacgagtcatttccagctttggtggacaagacactgtcgccaactattttgcttattccacgaatgtcgtatttattttacaggtgctcgcagttgtcattggcgcgaccttgatctcaacagaatttcaaaaaagaacaatcaagtttttattgatccggcccaaaacaaggctgcaaatttttctgtcaaaatacatcacacttgtgctgacggtcatatatttgtttgttttttattatgtattagcttttttatttggctttattttctttggtactgaatttgatgaaagtacgggacgattatttcagcatacgtttgctgttatcggatctcagtgggtggaagtgatgatgatggcaagcttcgcttttatgtgttccagcttgtttaggaacagcctcgttgcgcttgtgacctcgttttttgttttatatgcggcgaaatcacttgtgcctattatgtctcttttagaaaatcagtgggggaaaatcctgctttttgcgaatacggactttactcagtacagctttcaaggaccgccgccctttcatggcatgagtcctttgttttctctatttatggtaggggcgcattttgttttctttgttggcacggcttgggttcttttttggaagcgtgatgtaaatgtgtaaaaattgtgtcaaataacaagaaaaattcgtgacatctttgtgaaaacgagtctgcatttcacgataaccggctgattttgtcttataataagagggagtcttggaggtggcactatcgtgaaaaatttcattacggctttacccattttgttgttgctatcgttttcgtttgtgtcttttgccttccagtttgatcatcttatttatttcagactagcgctggggatcttttcgttagcgggtcttttctttctgtatacacttaaaagaaacatgaaatggttcatggtttatttatatgcgagctggatcattcttgctgccgtcacaacctttgaggagcctgtcttttctcagttcttcttcggtggtttaacaatgacaatgggttatctcacatatatgctcatttatttaggaatgaagcaggaccgtgtagcgaaatcacattaaaacaaaagccgataaaatcacatcatagattttatcggcttttttctttttgttgaaaaagacaaaagagacgagcagccagctgtgactgctcgtcttatgtttatgattcacgtccagcagctgcaagctgctcctgatgctttttgtcgattgtttcgtatatactttccatcattttagggtcgcgcatgatggccttcttgttctcttcaatcaattgctgatatgttttgattttcttcttagacatgtgactcatcgctcctttatataagtatagacgtctataggatttcatatagatgaaattgataatcattatcaattagcaactctattatacaaagcaaaatgtcagaagtaaagaatctattcagaaaattcacgtaaccgacaaattcgaagcctaatcgacgctcattctttcccaggaaataattcctgtcatttcttgtcgtaagtgaaacatctatataaaacattcttttgctcattgaaacgttttggatgtgcaactcgtcttatggagagatttgatgtaagagatggggaaggaaaaagacaccagcaagcgtttgctgatgtccttcgtttaaccaattaagaaacgtgcccttgaagaaactctgtcacttcttcaggtgattttgcgtttgcgctgtgtaaatgacctgttttttcgccatttttgaaaatcaacaggcttggaatacccatgacctgatacgtttctgctaattcagggaaatcatctttgtttatttcaaaccattcatggtgagcataagcctctaagatgtctggaatgaacatgtccattcttgtacagtcaggacaccatgttgcaaagaatttaacgatgacttctttgtcagattgaatgatttcattgaattgttcagtacttgtgatttttttcaatttgtcacaactccttttcaatgtcattttaatataaaataatggcgaatgacatacaaatgctcgggaggcgcttacaacctttacaaatcatttcaattccgtaacaacaaaaattaattagagcatttttgcttgaaagtgataagatagtaaagatgaattttagtggggggagtatccattgaaaataagtttaggattgatttacggcggaaagtcagccgaacataatgtatcactgcaaacagcccttgcagttacaaaagcacttaacactgagaagttcgatatacatccaatttatattacagaagagggcgaatggctaagaggagaaaaactcactgaaccagtttcaaacgtcaaaatgcttcaatttgaacagaacgcaaagacgtttttaccaacttctttaaatgagagcatgttcccgcagcctgcatctgctgatgagaagattgatgttgtcttcccattgctgcatgggccaaatggtgaagatggaacgatgcaaggattacttgaactgctaaatatcccgtatgtcggcaacggcgttcttgcttctgccgcgggtatggataaagtcatgatgaaagatgtttttgctcaagcaggacttgcacaagcaaagcacctttccttcaataaaaaagactatgaaaaggccacaccagacagcttagaacaggtggaacaaatacttggctatccatgctttgtgaaacctgccaacatggggtcaagtgttggaattagcaaatgccgcagcaaagaagagctgcaaaccgcattcgacttggctttccaatatgatcgtcgtgtggtcgtcgaagaaggcgtcgttggaagagaaatcgaaattggtgtattaggaaatgacgagccgaaatgctctgtcgttggtgaaattgcacctaaaacagatttttatgactacaaagcaaaatatgaagatggcgatacagatttgatcattcctgcaagcgtgtcagaggatgaatacaagacgattcatgatatggcgattaaggcatttaaagccctcgatggatctggtcttgtacgtgcagacttcttcctcacagaaaaaggcgaagtgttgatcaatgaagtgaatacaatgcctggattcacaccatttagtatgttcccgctgctttggaaacacactggtgtagagtatccagagctgattgaaaagctagtgtcacttgcaattgaacgccatcaagaaaaacaaaccattaaaacgactttttaatgtgagcaacaagcagacactatctttaggtagtgtctcttttccttcaaacgtgaaatgagaaagagaggcgaaaaaatcatgatcaaacgtacagtgaaacaaatcgcccaaatggctggtgggacactatctaatcaagcttttggcgaagagcaaattcacggagtgacaacagatacacgaaaagtatcaaaaggtgcattgtttatccccctaattggagaacattttaacggtcacacatttgcttctaaagcagtggagcttggagccgcagctgttctttggaatcaaaaagaagccaatccaccgttcggtgtacctgtcattcttgtagaggatacactggcagcactacaacagctggcaaaatcatacttggaagaagaaaaacctcgtgttgtcggtattacaggaagtaatgggaaaaccacaacgaaagacatgattcattccgtcttacaaacggcttatcaagttcataaaacagatggtaactttaataatcatatcggtctaccgctcaccattcttgcaatgccggaaggaacagatattgctgtgttggagatggggatgagtgcaaaaggtgagatcgagtttttgtcaaaactcgctgagcctgatgcagcagtcatcaccaatattggagaatctcatatgcaagatttgggatcaagagaagccattgctgatgcaaaatgtgaaatcacaaaaggattaaaagaggatggcatcttttattacttaggagatgaacccttgctgcgcgagagagcgactgcactttcgcagcgtgtgaaaacctttggagaagcagaagactgcgatatcaaggtaacgcatatcaaccagcttgcagaaggaactgaatttcaagtcgaagggtatgcccaggggtttctcattcctgtattagggaaacataatgtaaaaaatgcccttgctgcaattgccataggccagcactttgaactgaatgaaagacaaatcgcccaaggactcatgcaaacaaagttgacagggatgcgtcttgagctgtttaaaacagagaaaggaatcactgttatcaatgatgcgtataatgcaagtcctacttccatgaaagctgcaattgatcttgtaggagatatggacggcttcgctaatcgcattcttgtccttggagacatgctcgagatgggcagcgaagaagaaaggtatcattatgaactaggccgctacatcaagcctgaatttattgatcatgtgatgacgtatggccgcctaggtgcattcatcgctgaaggagcaaagaaatcattcggtgacgcgcgcgtgtcctcatttatggacaaagaggaactgaagaaaaaacttgctgacgtagcaggtcctgacgatgttgttctagtcaaagcctcacgcggcatgagattagaagaagtcattactgcactataaagagtgagcggcaaagaaggtgacagaatgattggctgtctatgtatacatggattcactggcgcgccctatgaagtggaaccgctggcgcaatatttaaagcagaagacagattggaacgttcagtcagtcacgcttccggggcatggagatgagcttcagctcaaaggcattttctatcaagaatggattgcaacagctgaattagaactgctatctctttaccgaacatgcgacaccatttttttgatcggcttttccatggggggaatgattgcttcttatctagcagcgaagtatccggttgctcgtctcgttcttttaagtgctgcggctaaatatgtgaatccaaaacaaatgattcaagacacaaggcagatgttgaaggaatcactgtctgggctgattgatacgaatcctttgtatgatagataccgccataagctaacgagcacgccgctgtcagctgctgtagaatttatgaagctggtgaagcaaacgaagagctcccttgagaagcttcacctccctgtgttaattgttcaaggtgaaagtgatgggattgtgcccgcttcaagtgcagaatttattgatcataaaatcccgtctcgtcagaaagaaatgttttatttacctgattgtaaacaccatgtttgtcacgagccatgtgcacagcaattgtttgaaaaagtagagcaatttctaaaaaaaacaatttaatctatagaaaagcgaaaatgtggctaaactaatataaattgaatcccacttgttaaaaattgcatcatttttgtcgaatgagtgacaagcctatggtacaataggaaagaaaaggtggttgattcggttgtttcattatgacggaaaaacctttgtcccgcagtctaattcgagtaacggagaagtatcggcaggaaccatatttcaatatcgtcaggacgggaatatattaacgggcacatatcaaggcggcagtattgtatctggtgtacttgtaggaactgtgaatgaggatggaacacttcattttaggtaccaccatgtcagcaaagacggcagcatgagaagcgggtcttgcaattctacacctaagcagttggataacggaaaaattcaactgttcgaaaagtggaaatggatggatggagatcaaagtgatggtgaatctgtcattgtggaacagtagatatatccatttctgtcttgttgaaaaacaaatagtgtaatggtaagatataaggtagggtaattcgggctttgtatataatggacctgtcctttcggaaaagggcagtttttaatgatcattcacgagattactgaaacagcaattagaaggagtttgaataatttgactataacgtttcaagattttcaattaagcgaaagtctcatgaaagctattaaccgcatgggatttgaagaagcaacaccgattcaagcggaaacaattcctctcggtcttcagaataaagatgtcattggacaagcacaaacaggaacaggaaaaactgcagcatttggtattcctcttgtagaaaaaatcgacccagcgtctccaaatatccaagcgattatcattgcgccaacaagagaattagcgattcaagtatctgaagagctatacaaaattggccaagacaagcgtgcgcgcgtacttccgatttacggtggacaagatatcggccgccaaatccgttcgctcaagaaaaatcctcatatcatcgtagggactccaggacgtttactcgatcacattaaccgtcgtacaatgcgtcttcaaaatgttgaaacagttgtgcttgatgaagcagacgaaatgctaaacatgggtttcatcgaagacattgaatcgatcctttcaaatgtaccaagtgaacaccaaacacttttattctctgcgacaatgcctgcaccaattaagcgcattgcagagcgtttcatgacaaacccagaacatgtaaaagtaaaagcaaaagaaatgactgtctctaacatccaacagttctacttggatatccacgagcgtaagaagtttgacacattgactcgtcttcttgacattcaatcacctgagctttcaattgtcttcggccgtacgaaacgccgtgttgacgaattgacagaagcgcttaaccttagaggttatacagctgaaggaattcatggtgacctgacacaagcaaaacgtatggttgcgcttcgtaaattcaaagaaggttcaatcgatgtgcttgtagcaacagacgttgcagcacgtggacttgatatctcaggtgtaacacacgtgtataactttgacgtgccacaagatccagagagctacgtacaccgtattggacgtacaggacgtgctggacgtacaggtatggcggtgacatttatcacaccgcgtgaaaaagatatgcttcgtgcgattgagcaaacgactaaacgtaaaatggaacgtatgaaagaaccaactctagatgaagcaattgaaggtcaacagcaagtaaccattgatcgtctgcgcacaatcatcagtgaaaacaacttaaacttctacatgacagctgctgctgaattgctagaagataatgattctgtcacagtggttgcggctgccatcaaaatgatgacaaaagagccagatgcaacgcctgttcgtttgacagatgaagcaccaatgatttcaaaacgcaatcgtaacaaccgcagctcttctaaacgtagagacggtggcggcggaagcggctatcgcgggaaaagccgttcatcttacggtgataaaaagcgttcttcaaatgaccgcaatcgttcttctaacgatcgtcgtcaaaagaaatcttataacaactaattcaagagcgaatcctttgcaggattcgctttttttaacaggtttgttgaaactttttaggctttgtttcgtaatatattgatagaaaagtaagagaatgggggaagaatgtgagaaaacagccgcaacgtcaaattagtttaaatggtttaaaggtatggcgtcttcaaaatggaattatctcattgattttcttactcatcatcattggggtatttgttgctagttattatcttcaatggccatattggattggcgccatcctcgccggtttatgggtcttacaggtcatttttggcatttggcttataccgaaaatccgtcatcgcatctggcgctacgaagtattcgaaaatgaaattgaaattcagcatggactcattcgtgtcacacgtgtgattgtgccgatggtgcgagtccagcatgtcgatacatcgcaaggaccgcttttaaggcgctaccgtttggcatctgttcaaatatcgactgctgctacagttcatgatataccggcgctagaattagaagaagcagatgagcttcgtgattacatatctcgtttagcaagggtgacggaagatgatgtctgaaccaaaacgtgtacatccaatctcgatgttcattgattttatatcagatgccgtatccatgatcaaaaacttcattatcccttttttcgtgcttatttttgtgaactcgaattcgagcattcgtttttatgcatttatcattcttggtgtgcttcttttatggaaagctgtttcaaccgttttagcatggaggcgattcacctaccggatggaagatgatgaatttcgcgtggaatccggcgtcatcacaaaaaagaaaaaatatatttcgttagaacgaattcaaacggtgaatacaagtgaaggtatcttccagcggattttcggcttggtgcgggtccaaatcgaaacagcaggcggaacggacggtccggaagtgagcctgacggcgattacaaaagcagaagcggaacaattaaagcaatcaattttcaaccggaagaaaagcttgcagcaagaagaggtgttggatgaaaatagggatgttccgcatgatcctctgacagcgcaacaacctgtagaagaagaaatgaatgtttcctatcggatgggtgtaccagagctgcttttggctgcgaccacttcaagcggaatcggagtcattatttccgggtgtcttgccatttacacacaaatagatgaaattcttcctttggacggattctttaagcggttctcttttttaagtcatgcgagtgttgagatttatgcgattctcatatttcttgccgtattgattgcgtggattcttagtgttggggtaacagcccttcaatatgcgaattttaccgcaaaacgaaaagggaaagacatcatcatcacaagagggcttatcgagaggcatcaaatgaccattccacttgcgagaattcaagcagtgaaaatcaaagaaaatattctccgtgagccttttggctttgcgacggtgatgcttgtgagcgcaggaggttctattacagaaaaagaaacctcttccgtcttatttccgcttattcggaagaaaaaaatcaacgaactgctgtctcaattcacagatcattatcacttggcgccagaagctgaactgaaaaaggtgccaaagcgttcactcaaacgctacctgatctcttacggctttgtgccattacttgtcggcgtgatcctatctgtacgttttccgccatgggggtatttggcactcattccgcttcctattgctttggtttttggctatttagcttataaacaatcaggctatacgatcaaagatccattgattcaactgacatcaagaggcattggcaaaaccactggcattgtcttgagaaaacgaatgcaaaactatacgatgacgcaatctttcttccaaaagaaaggccgattggcgagtattcacacctttgtgaaatcctctgcactgcttgattcctttggtgtgcatcaccttgaggaagaagatgctgcacgtgtaatggattggtattcgtatgaaaaaaataaatcttcttaaacaaaaaatgtcgatcagcttcccgttcataggagtgatcgacattttttatgaggttagtagcgtcttttttttgaatggaaaaatagcgtaagaggtgctaggagcatgccgccgatcaatccaaataagtgagccataatattgatgtttgagttaacgaaagtcatgatgacagagactgcaagaatcgttatgatcacctgagaattgccgcggtccatcatgtgcggtttaaatagaacaaggtataaataaacgccaaacaaaccgaagatggcaccagaagcgccgacatgtacatactctaaaggctctacccaataggttccgagattgccaatgaaccctgcaccaagatagatgatcagaaatcgaactttcccaagcaaatactcaagcgctggagcgaataagaacaaggacatagaattgaacaaaatatgggtcagacttccgtgaaggaaaataggtgtgacgagccgccaccattctccggcagctaccccataattgaaaccgacgagatggtcgtgaccaagctgtataagagggataggaatcgcaaatataagccacagaccaatttgcaaagcaaggatcgttgttacgattggatacgatctaataaattgttgaaagctctccgttcgaataaacataacaaaccccttttgactagataatggtaagtttatagtaacacgtttatgaagagaacatccaaattagtacgagtatcataggaggtacctcatgattaaaggaataggcattgatattgtagaaatcaaccggctcgcgcgagtgcttaacagacagcctcgtttaccagaacgaattttaacgttaagtgaacaagacatctttaacgaactcagtgaaaagaggcagctggaatttttggcgggaaggtttgtagcaaaggaagctttcgctaaagcttacggaacgggaatcggccggcatttaagctttcatgacttggaaatccagaaagacgaacatggaaaacctttcatcaaaagcaagaaaacgatgggcgaccaggttcatgtgtccatcactcacacgaaagaatatgctgctgcacaagttttaattgaaaggttgtcaagctagtctgcatattgtttgtccccccttcatatattgggtagtgcgataaggaagggcgagttgctaacaggctttgatggttcgcggtacgcagttaactcttgaggcgtactgttaaagtcaaacaagcggtttcttccttttaacacaattaacgaaggggttgaaaagggtgagaaaaagctttgttttgcttgtaacgggaatcctttttgtactgattctctccgcatgcggtcaaaaatctcagcaggatatcgttggagatttaaacaaaaaggcagaggaaatgacatcatacaaagccaaagcaaaaatgaccattgagacaggaaatgacccgcaggagtatcgagtagaaatttggtacaagaagccggaactttaccgtgtctatttagaaaatccgaaaaaggatcagagtcaagtcattttaagaaatggcaatggtgtgtttgtgctgacaccttcattgaacaagagcttccgtttccacagtgattggccaaataatagcagtcaggtctacttatttgagtcactcgtgaaggacattaaaaatgacagtgcagctcagttcaaagcgaaagattcaaagtatgtgttcgaaaccaaaaccaattatcagcacaaccaaatgctgcctacccaagagattacctttcataaaaaaacaatggcgcctgccagtgtgaaagtactggatagcgacaaaaagccaatggtgaaagtggaattctctcactttgaattcaataaatcctttgacaaagatgcatttgatgagaagaaaaacatgacactctctcaaatggatgtagccacaagtgcagactcatctgacagctttgcggtgaaaacgccagttgatatgccagagggcgtgaagaagatggaagagaaagaaatgatgacagatgctgggaaacgttatgtgatgacgtatggcggtaagaaatccttcacactcattcaggaaaaagcgagagtagctgaagcatctacgcctgtgacgatgaacggcgagccagtcgaccttggcatgacagttggggttctcacagatcaatccctttcatggacatctgacggagtggactacttgatttcttcaagtgatctatcgaaggaagagctcttgatggttgcaaagagtgtagaaggccagtcagctaaataaataaatatctcaggcgagagccttggaaatgaaacatcagccctatgcaagggctgatgttttttgatttgtttcacattattcttgatttttagtatcataatgaaggtattgaatcattcaatagggaagtgtgacggatggacacaaatgccttttatagagacacatgggcagaaattaatttaacagcaattaagcataatgtttcacatatgaaagatcatattggtcaaagtgttcaactgatggctgtggtgaaagccaatgcatatggacatggagatatagaagtggcaagagctgccctcaaagcaggagcagacttattagccgtagcctttttagatgaggccgtttctttaagaaataaaggcatcaaagcaccgattcttgtactcggcgccgtaccgccggaatatgtcaaagccgccgttcgatacaatgtcatcatgaccgcttactccatcgattggctgagagaagtcaccacaatgatgaaagggcagatgggacaacctatacgttttcatttgaaaatagacagcggaatgaaccgattaggtgtgaaaacgatagagcaagtgaacgaagtgaaaaagcttgtcagtgaacactcttatttacagctggaaggcgtatttactcactttgcgacagcagatgaaaaggatgaggcctactttgatcggcaggtcgatacctttcaaacattgctcgagccgcttcatacggacaagctgctcgttcattgcgccaacagtgcagcaggtctaaggtttaaagacgttttgtttaatatggttcgcttcggcatcagtatgtacgggctgtcaccgtcagaagaaatcaaggatgaattgcctttcaagctggaagaagccatgtctcttcatacaaagcttgcccatgtgaagcacattcaaaagggtgagagtgtcagctacggggcgacgtatacagccaatcaagatacgtggatcggcacggttccagtcggctatgcagatgggtggatcaggaagctggcaggaacggaagtgctcgttggcggaaagcgccggaagatcgcaggaagggtttgcatggatcaattcatgattgaactgaaagacaatcttccagtaggggagccggtcgttttaattggtaagcaagggggagacatggtatcagtcgatgaaatcgcaaaaaggcttgaaaccattaactatgaagtcacttgctcgattggccaccgcatcccaagagtatatatggaggacggcaaaagagtgcatgtacggaatccgctgcttcaaagcgggccaagctttttataaacagtgttcaaaagaacgatggtcaaactgacttcgttcttttttattcgacaaaagtagggtaaacattctcccttttttagagattttggaaataccgtatgattttcggaaaaaagcgtataatgggaaagaggaactccattatcatcttgatttacgggtggcgagccgcttcatgttctaataagaaatcatgaaaaaacagctttgcttgtgcattgaataatggtatgattagtcttggaatggatcgatacggtatccgtaagttttgtggaggtgtatgttttttgtctgaatccagcgcaacaaacgaaatgaagattcgactgccggagactttaatgtctgagatcgaacgagtagcagagcaggataaggtaacaagaaatgaattgatctaccgagcgacaaaaacgtatattcgtgaacgtaatattcgacaaaatcgtgaatcgatgagacgcggctacatggagatggcgaaaattaatctgaatatctcttcagaggcacaatacgcagagtttgaggctgagaatacagttgagcgattagtcagcgggggttaaacatttgattgttaaacgcggtgatgtttactttgctgatttatctcctgttgttggctccgagcagggcggggttcgcccagtattggtgattcaaaatgacattggaaatcgcttcagcccgactgctatcgttgcagccataacagcccaaatacaaaaagcgaaattaccgactcacgtcgaaatcaatgcaaagcgctacggctttgaacgagattctgtcattcttttggaacagattcgtacaatcgataaacaaagattgacagataaaatcacacatcttgatgatgagatgatggagaaggttgatgaagccttacaagttagtttggctcttattgatttttaatatggtgatatttggttgctctcctgtgagcaacttttttttgtgttcattttttattaaggctataatggagagagaatgaaagttattgttttttatgtatgtagggggtaaaatatgtcgaatcatatcgtgttagcttttgcgagagcgcaccaaaaggaattagaaaaagaatggactgacatcttcaaacgactcggagaagaagaaacggacatgatgctaaacgataaaatgtatgaaacgatttgttccgaatatgtccagcttattctagcatccctttcagaggcgaatgctgaggattttgaagaaaaagtgcaatcttttgctttaaaaattgtacaaatgggtatatcacttaagttactggcaaaagggctaacggaaatccgttcacacttatatcacaaaatgaacagtgacaaaaatactgaacaaggaagtaatgagctcatatgggaaattgatcggttcatctcaccagttcataacgaaatattgaatcactactccatctcatgggagaaaaccgtcaaccttcaaaaaattgcgttacaagaactttctgctccgctgattccggtgtttgagcacatcactgtcatgcctcttgtcggaacaattgatacagaccgtgcgaagaagatcatggagaatctgttaaatggcgttgtgaagcatcggtcacaggtggtcttaatcgacatcaccggtgtacctgtcgtcgatacaatggtggcacaccatatcattcaagcgtcagaggctgtgagattagtaggtgcaaaatgcttattggtcggtattcgcccagaaatcgcccaaaccatcgtcacccttggaattgatttatctcaagttacaacaaagaatacccttcaaaaaggaattcaaactgctttagaaatgacaaatcgaaaaattgtttcattggaggggaaacccagtgagaaatcacccgaagattccaatcttaaaattatataattgtcttctaatttcgatacagtgggagcttgatgaccaaacagcccttcactttcaagaagatttgctgaataaaattcatgaaacaggagcgaacggcgttgtcattgacctaacatctgttgatatgatcgattcatttatcgcaaaagtattaggcgatgtcatcacgatgtcaaagctcatgggggcaaaagttgtattaacaggaatacagccggcagtcgctgtaacactcattgaacttggtatatcactggaagaaattcagacagcattagatcttgaacaagggcttgagacattgaagcgggaattgggggaatagatatgaaagaccaatcctgtgtgaaaattttgacggaatgggacatagttgcggcaagacaactgggacgaaatgttgctaaagaattaggctttggaacagttgaccaagcaagaattacgacggctatttctgaattagcacgaaacatctatttatacgctggtaaaggtcagatttgtatagaagaagtgatggagcgcggaaagcgtggactcaaaatcattgcagccgatgaaggacctggcatcatggatatacgtaaagtgatggaagacggtttttctacatcaggcggactcggagcaggtcttccgggagtcagaagactgatggatgattttaaattagattctacacaagaacaaggaacggagatacaagctgtcaagtggcttcgctaggagggaaaccatggattttaaggaggtaatggagcagcggtatcatcagctgctcagtcgttatatcagtgatctaactgaaacatcgctttatcaagctcaaaaatttagccgaaaaaccattgagcatcaaatacctcctgaagaaatagtgagtgttcaccgaaaagtgattcaggagctataccctgatttgccggaagatgtctttcattcactagacttcttaattgaagtcatgattgggtacggacttgcctaccaggaacatttaacactcagaggcatccagcaagaaattaaatcagagattgaaattgctgcaaatgttcagcaaacccttctggaaacgaaaataccagaaggtgacacctttgatattggtgccattagtgtgccggcaaaacagatgagtggagattattttcactttgtcaccgatcacgatacaatcaatatcgcgatcgcagatgtgattgggaaaggcatcccggctgcgctctgtatgtcgatgattaagtatgcgatggattccttgccggagtcagggagcggcccaacaaaggtcctaaaaacccttaatcgtgttgtcgaacaaaacgtagacccaagcatgtttatcaccatgttctatggcagctataatacagaaacacatgaatttaaatacgcatcggctggtcatgagccgggctttttctattgcaaaaaagagaatcaattttacgatttagatgctagaggacttgtccttggaatcgcaccagactttgactacaagcagtatgagaagcacttggacgcaggagatatggtgatcttattctctgatggtgtcacagaatctaagtcagaggacggtttcttagagcgggaggatatcaaagcgcttatagcagagcacctatcctactcagctcaggaaatggtcgatgccatctatgccagcttactcaagctgcaagattttcagcttcacgatgacttcactttacttgtgctcaaaagaaaggtttagaaagtgaagatgcgggtatataaaattctaggaaacaagaatttcgaggtgaatgcataatgaatatgacagtgaaagagcatcaaataaatcaaaaaacgaaaattagtgtcagcggagaaatcgatgtgtactccgcacctgagctaagagaaacgctcatgcctaaagccgaggcgggagagcatcttgaaatctgtttgaaggatgttacgtatatggatagtacaggattaggtgtatttgttgggctgtttaaagcggctcaaaaagcaggtggaacattaaagcttgagaacttgtcagatcggcttgtaagattgtttgaaattactggactaaaggacatcattgacatttctgcaaagacagagggtggggtacaatgaacgaatcagtagatctaatcgagatgaaaatcccagcgaaaccagaatacgtaggcatcattcgcctgactctttcaggcgtagcaagccgtatgggctatgtttacgaagagattgaagacttaaaaattgccgtcagtgaggcttgtacaaatgcagttcagcatgcctacaaaggtgaacatggcgaagatggagaggtagctgttcgctttcttgtctacgaggatcgtctagaaatcattgtcgcggacaaaggcggtagctttgactttaagcaaaagcaggaagacctaggaccgtacacatctgctcatacggtcgatcaattggcagaaggaggtcttggtttatacttaatgcaaacattgatggatgaagtcgaggtgcaagcaaactccggagttaccgttgcgatgacaaagtttttaaacagggagcgagttgaccatgacacaaccatccaaaactatgaaactaactaaagatgaagtggatcgcctcatccaaagctatcaatccaatcaagatgagcaggcgcagctcacgctggtcgaatgctatacaaacttggtcgatatgctggcaaaaaaatattccaaaggaaaaagctttcatgaagatctcagacaagttggaatgattggtttactcggcgctattaagcgatatgacccgctcgtcggtaaatcatttgaagcctttgccattccaaccatcatcggagaaatcaaacgctttttacgagataaaacatggagtgtccatgtaccaaggcgaatcaaagagcttggaccaagaatcaagatggcagttgatcatctgacaacggagacgcaaaagtcacctaaagttcaagaaattgcagaatacctagatgtcacagaggaagaagtactggaaaccatggagatgggcaaaagctatcaagcgctgtctgttgaccaaggcgtagaggctgattctgaaggaagtacagtcaccattttagacgttgtcggctcacaagaagagggctacgaacgtgtaaaccaaaaaatgatgcttgagagtgtgcttcatgttctgacagatcgagaaaaagagattatcaatctgacttatttacaaaataagagtcagaaagaaacaggcgatttactcgggatatcccaaatgcatgtatcgagactgcaacggaaggcagttaaaaagctacgagatgcattatcagaagatgcgtctatggagctagggtaatgaagcagattgaacagcatgagcatgtgaatgctattatctatcaatcgaataaagaagggaaatcatgctgcggggacagtttttttattaaagcagatgatgaagaactaatttgtgctgtggcagacggattaggcagcggtcagttcgccaatgaatcatcttctttagtcagcgaaattgtcgaagaatatggacatgaggatatgacgaccctcatcgacagatgcaatcaggctatgaaaaataaacgcggggccacagttgcgatcttaaaggtgaatttttcccagcagcaatttacctattgttcggttggtaatattcggtttatcttgaatgccccttctggcgactatatttatccacttccgacatcaggatacttatcagggaaacctagaaaatataaaacttacacctattcctacgaaaaaggatcgacattcattatgtattcagacggactgaatgtgccaaacatgagaatgtgtttaaagcatagtcattcagttgcagacattgccaaacagcttgaaacatacacacaagacaagaaagacgatctcacctatgtacttggtcagctcatgtaaaatagctgaccttttttctgttttgccggtttttttgatacactaaaagagaagacacagtgagaggatgcaaagtatgaagacatctgactttttattgaaacaaattgcaacagaattaaagctttcaacaaaacaaattgaaagtgtcatcaagctcttagaggatggcaacaccgtcccgtttattgcccgttaccggaaagagcagacaggctcactggatgaggtgcaaattcaaaccatttcagagcgctatacatatatccaaaatgtcatgaaccgaaaagaagaagtcattcgcttaatcgctgaacaagacaaactgacggatgaattaaaacaaaaaattgaacaagctcataaactgcaagaggtcgaagatttataccggccattcaaacaaaaacgtaaaacaaaggcgaatgtagccaaagcaaaagggctcgagccgctggcggaatatgtactcgtgctgccaagcgatgagatcgagaagaaggctgcttcttttatcaacgaagaaaaggaagtaagaagtgtagacgaggcacttgaaggcgcgcagcacatcattgctgaacagctggctgatgatcctgatatgcggaaatggattcgcagtgaaacgtaccaaaagggcagtctggtcacatcaggaaaagacatcgagagcgatgagaaaaacgtctatgaaatgtattacgattatgaagagcccatcaaaaagatagtgccccaccgtgtactagcggtcaatcgtggagagaaagaaggcatcttaaaggcagccatcgaaccacctgctgaaaatattcgtttctatctcgataagcaagtcataaaaggcaagcagacgacggcgagaccgtttattgaagcggcaattgatgatgcctataagcgcctcattcagccttcaatcgaacgagaaatacgcaaagagttgacagaaaaggcagaagagcaagcgattcatatttttgctgaaaacttaagaaaactgcttcttcagccgccgatgaaagggaagcgtgtactaggagtcgaccctgcatttcgtacaggctgtaagttagccgtcgtggatgatacgggcaaagtctatcatattggcgtcatttacccgcacccgcctgtgcagaaaaaagcggaagccaaacaaaaagtcaaagagatcattcaatcatcaaacattgaagtcattgcgattggaaatggaacagcctcaagagagaccgaacaattcatcgcagacctgattcaagagctggatcagccggtgtcctatttaatcgtgaatgaagcaggggcaagtgtatactctgcgtctgcactggcgcgagaagagtttccagacctgcaagtcgaagaacgaagcgccatttccatcgctcgaagattacaagatcctttagcagagcttgtgaaaattgatccgaagtctgtcggggtgggccaataccagcatgacgtgagccaaaagcaattaaacagctcgttaaccttcgtggtggagactgtcgtcaaccaagtcggtgtgaacgtcaatacggcctcacaggcgctgctgcaatatgtgtcaggtctttcaaaagctgtcgcaggaaatatcatcaagcgccgcgaagagattgggagattcacaagcagaaaagagctcaaggatattccaagacttggtgctaagacttatgagcagtgtatcggcttcctccgcatcgcagacggacaagatccacttgatcgtacaggcattcacccagagagctataaagaaacaaaacaattcttacgcatgatcaagatgacgccagacgatcttggcacagagcagttaaaggagaaaattgcagaggtcaaactggacgaagcagcagagcagcttgatattggtatcattacacttcaggatatcatcgatcagctgacaagacctgagcgtgatccgcgcgatgaagtcccaaaacctcttttgaaaacagatgtgttgaaattggaggacttgaagcaaggaatggagctgcaaggaacggtgcgaaacgtcgtagacttcggcgcattcgttgatattggtgtaaagcaggacgggcttgtacatatttcaaagctaagcaaccgttttgtgaagcatccgcttgacgttgtatcagttggtgacattgtaactgtatgggtggactccgttgaccaggcaaaaggccgcgttgccctctccatgctgaaaccagagtaaacaaaaaacgaggcgcaccttaggatggggtgtgccttgatgtgactgaatgtttttttctgtagaagtaccagcattgattcagcaatttgatttggtaatgatttttttcaaaaaatgccttctgcatctgatttttcagccagttgggcatcgcccattcctcctttgatcgaaacagtgggtgtaccttcaatgtatgcaaaggggaaattgtcccgttcgaggtttttatagaaaggaacgatcttgattgaaggagagggagttacagcagttaacagagcatatttctgagcagttctttggtaaggcattccgccatcaagctgtttttaatgaccgtctcaaaacgacaggcggaagatatttgcttggtacacacaatattgagttaaatcgccgatatttagaggagcatggaagagacgaattgatcggtatcattaagcatgaactgtgtcattatcatctgcaccttgaggggaagggctatcagcatcgtgaccgttcctttaaagagttattagaacaagtaggagccccgcgtttttgtacaccgctaaagacggtacaaaataaacggcgtgtacagaaacgtcatgaatatgtctgcacaggatgcggtcagtattttatcaggaaaagacgatttgatacctctcgctatgtatgcggcgtctgcaaaggaaaattaaaatggcagcgtacaatcgatacagaatgaaaagcattcctttatgggatgctttttttgtggccaatggaactgatcatcgtgatatgtaggagatgaagtagacatattgagacaaaaagagacgcaagtctcattttgtctcttttttgatcggtgtgaatcgttcaaaacctaagttttcaagtgccatgatgttggcacgttttttgcttgtatataagtgcaagcaaaaaaagataggaggttttaccatatggaaatggcactcacaaaagaaaaagccgtttggatgtatcaaaaaatgcaggaaatccgccaatttgaagatcaagtacacacgctttttacaaaagggatcttaccaggttttgtccatctttatgctggcgaagaagctgttgctgtaggagtctgcgctcatctgaatgaacaagacagtattacaagtacacaccgcggccacggccattgtatcgctaagggctgtgatctaaaaggaatgatggcagaaatctatggaaaagccacaggtctttgtaaaggaaaaggtggatccatgcacattgcagattttgataaaggaatgctcggtgccaacggaattgttggaggcggctttccacttgcgtgcggggcagccctcacggctaaatataaaaagacaaacaatgtaagcgtttgcttttttggggatggtgcaaacaatcaaggaacttttcacgaaggaatcaatctcgccgccatctggaaactgcctgtcattttcatcgcagaaaacaatggttacggggaagcgacgccattttcctatgcttcaagctgcaaatcgatcgtggatcgagccgccagttatggcattccgggtattcaagtagatggaaaagatgtgacagccgtttatcaagcagcagaacaagcgatagaacgagcaaaaaatggagaaggtccgacattgattgaatgcatgacatatcggaattatggacattttgaaggagatgcccagcgctacaaaacaaatcaagaaaaagcagaacaccaagaagagaaagatgccatcgctctttttaaaaatgaattattaaagaagcagctgctgacgaatcaggagatatcaagtattgaagcggctgtagcagaagcgatagatgaagccgttagattcagtgaagaaagtgaatatccagatcataccgaattactgaccgatgtgtatgtttcgtatcaataaatcagaaaggggagaggaaaatgacaagagaaatcagcatgtctagtgctttgaatgaagcgattaaactggcaatgagaagagacgaagatgtcattttaatgggggaagatgttgcgggaggcgctcatgtagatcacttacaggatgatgaagcatggggcggagttcttggagtaacaaaaggaatcgtacaggagtttggacgtgagcgtgtcctagacacaccgattagtgaagctggctatgtaggcgcggccatggcagctgcttcaacagggctaagaccaattgcggagctcatgtttaatgattttatcggtacttgtctggaccaagtgctgaatcaaggcgcaaaatttcgatacatgtttggcggaaaagcagaggtgccgatcacgattagaacgacacatggggcgggttttagagcagctgcccagcattcgcaaagtttgtatgcgctatttacaagcatccctggattgaaagtagttgtgccttcttcaccttatgatgccaaagggctgctgctggcagccatcgaggatcaggaccctgtcatcttttttgaagacaagacgctttacaatatcacaggagatgtgccggagaggtattacacattgccgcttggtaaagcagatgtgaagagagagggttctgatgtaaccatctttgcagtaggcaaacaagtgcatacagcactcgaagcggcagaagagttagctgcacgtggtattgaagcggaagtgattgatccaagaagcttgtcgccgctcgatgaagaggccattctgacttcggtagaaaaaacaaatcggcttgtcattgtggatgaagcaaatccaaggtgcggaattgccgcagatatctcttctttgattgcagataaaggattcgatttacttgacgctccaatcaaaaaagtgacggctcctcatacaccagtaccattttcaccacctcttgaagatatatatctgccgacacctgataagattgtgaacaccgtattagagatgattggcaagagtcatgacaagatcttgaactaaagaaaggagagagggagatggctgtcgaagttgtgatgcctaaattgggtatgtcgatgaaagaaggaacggtatctgtctggaataaggaggtcggtgagaccgtaaataaaggggaaagcattgcaagcatcaactccgaaaaaattgaaatggagatcgaatcacctgctgaaggaaccatattggatataaaagtgtctgagggagaaggtgtaccgcctggcacggtcatttgctatatcggtgaaggaaatgaacaggtggaggaaaagaaagaaagagacgtccagtcaaaaccaaagaaagagagaaagaaaatctcccctgttgctcgtaaaattgcgaatagcgtaaacctagacattgatacgctggtggggacaggaccggggggaagaattacgaaagcggatgtgcttcatgcgcttccagaacgggcagagaaaaaacaaaatgagacagagcatcaacctgttaacacgatgcggaaaacaattgcctcaagaatgatggaaagcctgcaaacaagtgcacaattaaccattacgatgaaagcggacgtgacaaaacttacaaacttacaacaacagctgaatgaaacagccatagcccgtcacgagacaaaattgaccatgaccgattttgtagccaaagcaacgatcctttcattactcaaacaccctgcgatgaacagtcaatatcaaaatgaaagagtggaaacttttgagtatgttcatcttgggatagctgctgctttagaaaacggcttagctgtgccagttattcgacatgcggagagactagcgctcattgagctagcgaagaccatcaaattgtatggcaaaaaagcacgtgaaggcaaacttcttcacgatgaaatcgaaggctctacctttacgatcaccaacctaggtgcatatggtgtagagcatttcactccgattttgaatccgccggaagccggtatccttggcgtcggaacaatgtatgaaacccctgtttatcgagaggatgaattgtgcaaagggaccatcctgccactcagtcttacgtttgatcaccgcgtgctggacggagcgccggcatccgcatttttatcaacggtcaaagcatatttagaagaaccaatatccattcttttataggaagaaggtgaacgtatcatgacactggtcattataggaggcggaccagcaggttatgtggcggccataacagccgcccgttttggcagggaggttgtgttaattgatcaaggtcagctggggggtacctgcctcaatgaaggctgtattccgacgaaagcgcttttgcaaagcgccgatatgtttgagcatgtgaaatcggctgtacattttggaattgagcttccagaacatgagcctgtcatccaatgggatgccgttcaaaaacggaaacagtctgtcgtcaagcaactaactgatggcgttcgctacttgatgaataaaaacaaaatcagcgtgttgaatgggaaggcgtcatttctatcggcacacgagctattggtagaaagtgaagggaagtctgaaatcattcaagcaaaacaaatcattattgcatcaggggcagcgcctgctgctttaccttttgcaccttttgatggggaatggatcattcacagcaaggatgccatgtcactttcttcgataccagattcgctttgtattattgggggaggggtgatcggctgtgagtttgcaagcatatttagcagaatggggacaaaagttgtcatggttgagcaggcagtacacattttacctggagaagatcgtgatatagcacaatgtcttcacaagcaacttgaagaaacgggtgtagacattttgacgtcggccgcagtcaaacagcttgattgttcttcaagaaaagtagtggtggagaaaaatcaaggagagcagtgtgaaatccagtctgatctttgcttagtggcaattggcagaactccgcagcttggagagttgaatcttgatcaggtcggcattgaatttgacagaaacggaatctatgttaatgaacatatgcaaaccaatctcccgcatatctatgcgtgcggtgatgtgacaggtggggtccagcttgctcatactgcttttcatgaaggaacggttgcggcatcccatgcatcaggtgaacatgtaaaagtcaatgaacaagtgattccaagatgcatctacacctctccagaaatcgccagtgttggtataaatgaagagagtgctagaaaacaatatgaggagattcggatagggacatgtgcattttctgcaaatggaaaagcattaatcttaaatcaaccagccggtcaagtaaaggtcattgtagaaccgcaatatcaagaaattttaggtgtatcaatcattggaccgaatgcaacagaactgattggacaagcggcggtgatgatgcatacagagctgaccgctgatacattagagcagtttattgcggcacatccgacactttcagaggcgatacacgaagccttgctgcaaacaatgggacgagcggtgcactgctgaaaaagactctatttctatccgattgacttcttgggttagccaatgttaattgaaagcgcttttataattatctataatgaataaaaagcccccagaggagaggatggaatgaatccgacgccttgttatttaaatacgtggaaacgttttgttcgtgaaggtttgcttgatcagtctcgtctgaataagagagtgatggaatcatggcacaggtgtaaacaggcaaatgttaatccgtatttagataaaggacagtcgttgttagaaaaggaattattcagtgcccaaaaaaagaaatactcattattcctcaataccgctcttccttacttaaataaaatcagtcagcaattaaaagaatctgacatgctggccttactcatcgatgcagacggttatgtgctaagtctgacaggaagcgaaagaacgatggtggaagcaagaaaaattaattttatggaggggtcgcgctggaccgaaacagatgtagggacgaacgctattggaacggcactcgtcatcggggaagctgtgacgatcaacggaactgagcatttttctgtcgcctctcaccattggagttgttcagccgctcctattcgtgatgcagacggtacgatcataggggtgattgatatctcctgtatggcggataacaagcacccttttatgcttggaatggcttcaacagttgcttatgccatagagagagaaattcaagtccagcaaaaaaggagagagatggagctgatcactcattgtctccagcaggtggaagcagacgaaccgtatgtggtctgtaatgaaaaaaagcaaattgtttctgcaagcaggtcgattagagaacgattttctgactggtacggaatggatgtcgagcggcttaagggtcatccatttgttatccggggaacgcagatcattcaatcagagcaagatggaaagatgctgggcatgtccctttcccttgaagaagcagcgaaaaatagcatcaccgtttcttttgctcaatttcccggggaatctggaacaagtaaggtgtttcaacagacgctcagtgagatgaagagagcggcacaaacagatgccaatgtatatatttggggcgaaacaggtacagggaaggaactggccgctagagctattcactcagccagtgagaggcatagaggaccgtttattgctgttaattgcggagccattcctgaaagcctgttagaaagcgaattatttggctatgctgaaggggcttttacaggagcaaaacgtcacggagctaaagggaagtttgaacaagctcataaaggaacactctttttagacgaaattggcgaaatcccatatgcgatgcaagtagcgcttcttcgggtgatagaagaaaggaaagtcgtaccgctcggcgggacacacgaaatccctttggatattagaattattacagcgacacaccgaaatatgaacgaactgctgaaggaaggaaaaatacgagaagacttgtattaccgtcttcatgtctatccaatcaacatcccgccgcttagagaaagaaaagaagacattcatgatttatatcgttattaccaaaagaagtaccactggaatgcggtatttcctgaatcattttttcagacattgcaggaataccactggccgggaaacatacgagagctttttaatctgtttgaacatctaagggtcctctttcctaaaggcggatggattggtgaatcgcaatatgcttcagtattagagacgattgatcagaaaaagcagaagctgcatccagcagagtgtaccgagattccaaaagaactcacgtttagggagcgcattcaaaagcaaacagtgatagaagcactgcataaaacaaaaggtcatgtgtcagaagcagcgaagttagcaggggtgccaagaagtactttttataagtggatgcgaaagtttaagctgtcttagtctcctgaggaaggctgcatcaaggcccttggtctacgtgaagaggtcgggggctttctgccaagttaaacaaatggcatggaaaaaggcttgactgttatattagtatatgttaaattataaaagccgtcgcaaatgggccaggaatgaaacgctttaaaattcttgacacatttttctggcatatatataatgaaacatgtcttattattccgcagtagctcagtggtagagctatcggctgttaaccgatcggtcgtaggttcgagtcctacctgcggagccataatggagaagtactcaagtggctgaagaggcgcccctgctaagggtgtaggtcgcgtaagcggcgcgagggttcaaatccctccttctccgccattattttatggcccgttggtcaagcggttaagacaccgccctttcacggcggtaacacgggttcgaatcccgtacgggtcatgttttgttttttgattcgttgggctatagccaagcggtaaggcaacggactttgactccgtcatgcgttggttcgaatccagctagcccagccattttttatatatgtttttctgcatagcagatgagccattagctcagttggtagagcatctgacttttaatcagagggtcgaaggttcgagtccttcatggctcaccattgtcacgcgggtgtggcggaattggcagacgcgctagacttaggatctagtgtctttatgacgtgggggttcaagtcccttcacccgcattgttttttcaaacagtgcacttatgaatataagagcacatcatacacgcggtcgtggcggaatggcagacgcgctaggttgagggcctagtgggtgaataacccgtggaggttcaagtcctctcggccgcatcccaataataccaagggtttaaccacctttggtattatttttttatgcggaaattacagctatgggagaagacttgcttaccaaaaccatgcaccttttacagcagaaatattgaatattgctagtaaagtagtaacggttttttttcataatatcttttagcataatcaaacgctatgtcataggatttagatttagtatatcctactgaaagagttatagtctctgattaatttggaaacaaacttatatgtacctccaatagctagtcttggtactggtgaaaagacgatctatattttagcggctaaagtcctgaatgcatcagcaaattgagttgatctcaatccatctaaagccccgcctaataacgccgcaaatggagcaacgccttttacaagaaacgagcgtccattttatcctaaaatgatggtttattttttatcgagtaaatttatgatacgttttcctcgtccacctccagcttctaaggaatgatgagctttggcaacatcagataaaaaataaatgctatcaataactggtctgaccttgttggaatctacataagatgctaattcttttagaagttcatttttgggatttgcactgaatgtgcgaactctacgagaaccgaaagtagttgaagctaatatatatattaaggacgaaaaactaggaaatccaatagtaaccattctaccgttctttgcaagcaagcgcctataatgtttgaggtcagttcccactgtgtccatgactacatcaaactttttaagatcagtaggagatgtttttttataatcaaatacttcgtctgcacctagctcttgaagaaaagtaagatgtttttcgtttgcaagagcagttacatgagcacccaacattttgccaatttgaatcgcaatgcttccgactcctccacttgcaccacgtacaagtaacttttcgccttttctaagtttagttttatattttaaagcaataattgcagtagcacctacgccaggcaatgccgcagcttgtaagagatcaacctttgtaggaattttagatattttctcaggtgatatagctacatattcagcggcactaccaatttggctccttaatttcaaaggaagaactccccacactctatcacctaattgataattttttacgttcgatcctacctcaacaacctcaccagaaaagtctgcccctgttcctttagggaattgattacccgttaatagtttcatcttgcctgatcgaaatagcgtatccatagagtttacactcgacccatgtacacgaatgagtacttctccagtttctataacaggttttgatatagaatcttcaaaaagaacattcggtgatccatatttagtatattgtgcagcacgcatcttttcatttttcatttactcactccatttcctagaaaaagtatgaacttgaagggttttaaaatcaatttagctctctaatacatgggtgacatggtttacatatttgattataataaatggaattgatttaacaagtactcaatataaactgactaagtaaggaaaaactgactaaggagtggataaaatatgactgaaagtgagctaaataaagcgatagctccagcaagttatgccttaaatatattagcgggaaaatggaatttaaaaatcttagctgtactatgtagttacaatgatattcgatataatgagttaaagcgtaaagtgtatggaattacaggaacaatgctcaatcaatcattaaaggatctgattgaaaacggaattgttcaacgagttcagtataatgaagttccatcaagagtagaatattcattgactggggcaggactagagctgatccctatatttgaacaacttcttttatggggcgaaaaccaattagaaaaatcaaaatcaaaataaaatgaatataaaaagaaaactagattatccaagggtaacttttgcagtgcttgatatggctggccacaacctgcaaattgaacaacccgatgtatttaactcattagtccataactggttaaacagacttgaggcggaaaatgttaagtagtttttctctaaatgactgtccactcatcttaagtaagtggacgtttttgtttgagaataatatttttatataatgcagtccaatcatccccataccgtttgaaaggtttttttgctatccatcgaaatgcttcaactattagtaagatttatatgttttctaccgatttgacctatgttaaaaaagtctaactaaacaatcataaggcgggttgagtaaatgcttggattaccaagaggggaggtttttttagttccttggtctgttgaatgggtcaaagaatttgaaatggaaaagaaacgaatagtagaggttatcggtcagtacacagtgaatgtccaccatattggaagtacagcagtaaagggtttaagtgcgaagccaattattgatattgcaattgaaatagatgattttcttgacggagaacagtgcgtaacagctttggaagggctaggttattcatataaaggaaccaatgttttacctgaaagacactatttcaacaaaggagaaccacgtacacaccaaatccatatgtatcaaacaggcaataggtatttactcgaacagttaaatttcagggattatttaagaagtaacgaactagtaagaagtgaatacgagcagctcaaactgaacctatcaattttaaataaaaatgaaaaacacaaatatgcagaggggaaaactgactttgttcagtcgattttagagagaatttagaaaagattctctcttttggtgatcaaactaactgattttatgcacaagtggactcgctacaaaggggagtttcttctttttaaccaaaatcaacattattctttaacatagctaaattaacaagggtgagggatatgaaatttgtttattcgtttcatcattcaaccccctgtcttatttgtgtcactatagcacgtttggtgctcttttaaatcctaaattgcaattatttccgattcatgttacaataagaataattatttttgttcggcgtaaaggatagcatgaagaaagacttttcgtcttgaggatactttgggcaaggatagtataatacattgtgtggtaaacgcactaggaggcaacaaacatggaacaaggtacagtaaaatggtttaacgcagaaaaaggttttggatttatcgaacgtgaagaaggcgacgatgtattcgtacatttctcagctatccaaggtgacggattcaaatctttagacgaaggtcaaaaagtaacatttgacgtagagcaaggttctcgtggagctcaagctgctaacgttcaaaaaactgcttaatcttcatttttaaaaacaggatctctgtagagagcctgtttttttgtgttttcatttatttcttcaataaaaaaccctactcagcgtacaagtagggagatgttacaaggtaatcgtaaaaaaattcatgcttcaaaggtttatcaacagtatagcatattggatttacaatatgcggaatttgcctaaataaattcttttttctttcataagttgaagggtggataggttcttagagaacatgtaatcaaaaatggtgaggggtgcccaaaagagcggcagagttcttaacagaaactttttatttgcttttctgtaatccctttgatgacttctaattcacttagcaaaaattcatgggcatcatctagcattttcttttcacttgcatttagtgctttctctttcttcatacgcatcaggtcacgtacaacttcagcaccgtcttggatgttacccgtttttattttgtttgtattaattgtatgacgttctttccatgtcagtatttgatctgatttgccatgctggaaaatgtgtatcacactgtttaatgccagtatatctgtaacaggtctaatacgtgaacccgacattttccgtgttggtatcatcactttcatatgactgattgacatattaatcacataatactgttgtttttcatcagaaaattctttttcttctatggcttcaattatacctgctccatgcattggatacacaatgttatcaccaatttgaaacatatcatccacctccatattaagtacctactataagggtaccacaaatcgatccgaaataatcaaatttttaataataacatgtttatttattttttgtcaataaatttagttctaaaaaagagagattattttgaagaaattttgggtgtgattgtttttttattatccatgatttttgaacatatcctctagaatcctcgctataagaaaaacaggatatccaccattaaaaaagaccagccattgagctagtctttcaaaatagaatccgatcataatgtcgaaatatcaatgacaaaccgataacgcacatcacttttcagcacacgttcatacgcttcatcaacttgacttgcgttgatcacttcaatttgtggtgcgatattgtgagcagctgcaaaatcgagcatttcttgtgtttcttgtatgcctccaacgagtgaaccggcaatgctgcgacggccagtaatcaatgaaaagacgtggaattgatctggctcaggtggtgcaccgacgttcaccaaggttccatccacacgaagtagggacaaataggcgtctatattgatattggcagagactgtgttgagaatgaggtcatactgaccggctagtgtctgaaaggtatgaggatcacttgtagcaaaataatcttttgcaccaaatgacagcgcctcttcttttttattcaaagagcggctcaataccgtgacttcagcgccaagtgcacgggcgaattgaatggccacgtgaccgagtccgcccattccgacgatggcaacttttttacctggccctgccttccagtgctttaacggtgaataagttgtgattccagcgcagagaagaggacttgcggcatcaagggatagttgatctggaatgctgacgacaaagcgctctgtcacgacaatcttctgactatagccgccgtaagtcggttccccgtcataatcgaggttattataagtttggacgacccctttcgtgcaatattgctcgtctccattttggcaatattcacaggtgccgcaggaatcaacaaagcagccaacacctacacggtctccgatctgaaatttcgtcacatcatcaccaacagcggcaacgactccagtaatctcatgacccggaaccattgggaaaataccgccgccccattcatcaaaggcactgtggatatctgaatgacagatcccgctaaattgaatatcgattaaaatatcatgtggacgaagcgctcttcgttcaatggttgtccgttcaaagctcgcttttgcatgtgaaacacttaaaacgtttgaatggtgcgtctgacacattcttgatcatcctttcaagtaagattctttacttctatactgtacgtcttaaagtgaactctaagtcaatagagaaccctcttcaagcttttcaacatccttaaataaagaattgagccaaaagcatcttgcgttctctatcaaattggagatgatgagaagaaggaatttcataaggtgagagaagaagagaagggtgaaaacaatgaaaatagcacaagctgcaaagcagctcgatttatctactgctacgctcagatactacgagaatattggtttaattcgaccgatccggcgtgatgaaaacggagttcgtgattatgctgaagaggatattcaatggattgaatttatcaaatgtatgagaaatgccggtctctcaattgatgcacttcgagaatatacggctttatttatcgagggcgaggatcgtaccctgtcctcgcggaagagtattttggtcaatgagagagaaagacttgtagaaaaacaaaaggaaatcgaagagacgattaagcggttagattacaagatagaaagttatgaagatattatccacagctatgaacaaaagctggttcatcaactaaaaaccagctcaatttaaatgaagaaaaacctgtgacttttcacaggttttgtgatgtggttatctttttgtgtaacgcacccagttataatgtgcgtggagcggtgtaacaccgttataggagccgagccattcatcgacacctgcaccattccagaggttcatcataatctttcctggagtttgagggatttgagtagtggcagtatgttttaattgtccatctacataccatttaatcgagttaggctgccagtcaaatgcatacgtgtgataagagtttgctgcatcaaaaccaaggttgacgatcttttcatgatttcctacaccattggtatagtagttaaactgaacctttgtcgtatcttttccaagaaattcgatgtcaatttcatcccaaggtgtaccatcagtcggtcctgtataagtaaagaacgaagacacgatcccaacatttttggctggtttcatgctgacttcataaagcccgtagccatatgtttgagtggaacggttttctccgcagtcaaacttattataggagggacttgtgagcgataatcgcatttcacctaatgacgtcatggagacattatttgcacgccacgtacagttaaacatgtttccattcgagtacccatcggctttttgccataaccccgtattatagttgttaaaaggctcgtaaaacgacccgcctgtttgtgccgaggcacccgcagtaaatgtggacaaactcaagactaatccagtgacaagcagcatcaacattcgtttcaaacggtaagacatgtaggcattcccctctcctttttgaaagcgttttcttaattgatcatacatgattctctcaaaatggaaaatcggtctaatatatgatattaaagaggattttttgctagattcttctcttatttcataggaagttactaaagaaaatggtataaacagcaaaagatcatcaaaaactcattcgttaaaattgagtttttgatcttttcatgccatttaataaagaatgattgacaaagcggacagttgtccgtaagataatatcgggacaattgtcctaatgagaatcaaaagagatgagatttaacacatagagataagtgcaatatggatgaaggtaaagaaggtgaggcatcatggaaaaggatattggaaaggaaattgaagaggtcgctttttctttgtttcaggaatttggcgtggaaaatgtcagcatgcataaaattgccaaaacggctggtgttgggcagggcactctttaccgccgctatgccaataaaagtgatttgtgcctttctatccttggagaaagatttgaacagctgatccctgctttgcatctttacttgagcaaaatcagtgaccagccggttcgtgaacgtttgcgttatgtgctcgaagaaattcatctcatcgtcggtcatcatttagactggattcggatgcttacaatctctggaaatttagagcagacaagtaaagtgtatgattgtcattacagtcaatcgcttaaacaaatcattcgtgatttgctggaggaagcagaagaaaaaggggaagcgaacatacaggatattgagctgacgacattatgtatgtcctctccgatgacgcctgaactgatgttttatatttgtgaatctggttattcaatcgaaaaaatcgctcaattcgctgcagagaaacagattttatctgttttcaatagacattgaagtggctcatttctgaccagcctgacttcctatgattgatctaaattgaaaaagaaaaggagccaacctactatgaacaaacagcaagcagcagcttctcatattcgaacgctgcccattattatctcatttatcacagctggttttattggcctgttcagtgaaacggcactaaatatggcgctgagaagcttaacgttagactttggtattgaagcaacgacagctcagtggctgacaacaggatatttattaacacttggtattctcgtaccaatttcaggactcattcttcaatggtttacaacaagacagcttttcattacgtcgctcatcttttcgatcattggaacatttattgcggcggttgcgccagtctttagtattttaatggtggcacgtgtcgtacaggcagtcggtacagcattgcttcttccattgatgttcaatacgattttggtgatcatcccgcctcataaacgaggcagatcaatggggattataggtcttgtgatcatgtttgcaccagctgttggtccaacagtctctggtcttattttgaaatcgctgacttggcattggattttctggatttcacttccgttattaatagctgcactcgtctttggttttatctttatgcaaaatattacggagccaacaagaccaaaaatcgacattttatcgattgtgctttcaaccattggtttcggaggaattgtgtatggctttagcagtgccggtgaaggcggcggctggagcagtatgcatgtgatcgttgcaattgtagtaggtgtcattgggattcttgtattctctctcagacagttgaatatgaaggaaccgatgttgaacttaagtccgtttaaatatccgatgtttgtcattgggttactgctgatcttagtgtgtatgatggtgatgctgtctgctatgatgattttgccattgtatctgcaaacatccttggcactaacgacatttacagcaggtttaatgctattgcctggtggaattatcaacggtctgctatctccaatcatgggtgggctatttgataagtttggaccaaaatggcttgtgattccagggcttgtcattgtcgcagcgacgatgtttggcttcacgaatttaagtgtgaatacatcgattggatacattgtgacccttcatattacgttaatggtcggaatcgcgatgatcatgatgcctgcacaaacaaatggattaaatcagctgccgccagagctatatccgcatggtacagcgattatgaatacattgcagcaggtgtcaggagctattggtactgcggtcggtatttcgatcctttcatcagggacccgcagctttatggaaaatgtggctgatcccgcaaatccgatgaaccagctgctcgcctttacaaatggcgtccagcatgcatttatctttgctgtgatcatgaccgtcattggtttgatcatcgctttcttcattaaacgagtgaaagtagaacagcaagtttcataaaatagatgaaaagcactgaggacctagcgccgcagtgcttttttgatttgcccaatgcttgtttcaaagagagcgaaaatggggagatagataaaaagtgaaccaatgagaatgtgctgctgattcagtagaaggaaaagaggaaaaaggaacgaatgagttagaagaaatgaataagataggagactgagatcatgaacttagaagaacaaatcaaaatcgctgcgtcattacgtcaaccagctgaaggttcattaccgagtcaatcggaactaaaaccagtccatcctcctgaagtaaacaaaatggaatatgacattccaacaagtgctggcgaaacaaaggtatgggtatttaagccggtcaacacatcaaagcagccgcttcctgtttttgtgaatttacatggcggaggatttatcctaggcagtgctgaaatggataaccactggtgtccggtcattgcagaccgagcgcaatgtatcgtcgtcaatgtggagtatcagcttgccccagagcaccctttcccggccgctcttcatgaatgctacgatgtgctgaagtggctgtatgaacaccctgatgagcttcaaatagatcccaaagcaatagccattggcggacatagcgcaggaggaaacttggcaacggctgcttgtcttttaaatattcaaaaagggaacaaactcccgattgtctatcaagtgcttgattatccgccgcttgatttagccactgatccagcacaaaaaccagcgtttgaagaagcgatcccagttgaaatggcgagactctttaatgccttctatctgcaaggccaagatccgcacaatccgctcgtttctccgatctttgccgatcgttcatccttggcacaaatgccaccagctctcgttatcacagctgaaagagattcgctagctcaagaagccgaacaatatgcggagaagttaaaagaagcaggggtagatgtcacgtacagacagtttaaaggagtccctcacgccttcacgcatgccggagatttagcaatagctgaagaggcttggcatctgatgagtgatcaattgaagaaggcatttgaataagataagaacagtgatgtaaaagcacagaacccagcgggtctgtgcttttattgttgttaagtgaatgaaaaagatcagatatctgccttcattgtcgatataatagaaagaatagaagaggacttaaaaaaggagcgaatctaatggaaaaagagaaactacaggcattttgtctttctttaaaaggagtaacccatgattatcagccagaatggcatgcagatcgttatcatattggtggaaagatgtttgctatgatgggcggagatgcgaatcgaaaacctgtcatcactttaaaatgtgaccctcaacgagctgaagaactaagagaggcgcatgaggggattattccgggctattatatgaataagactcattggaattcgatttaccttgatgcggacattccatcttcatttgtagaggagttaatcgaacattcctaccaattggtttttcacaaattaacaaaaaaatctcaacatgacatcctccaacatgatgaatgaagtgagacaagttaataaaccgtgtgattctcttcaaaattgactagagcgaagtgctgtcgttataatttaaccagttagaagacgttaatagggggatataattgagctatacagtcattacaggagcaagttcaggtattgggtatgaggcggcgctagcctttgcagcacgaggcaaaaaccttattttagctgcacgccggctcgagaaactccaagaactgaagaaagagattcttgatcaatatcccgagatcaaagtaaacatacagtctgtcgatttaaccgacatggagcaagtgtattcattttatgaatcgttggctgaatatgagcttgacaccttcattaataatgcagggtttggccatttcggttcaataggagaacaggatgtaagtaaaattggggatatgcttcatctgaatatcgaagccttaacgattttatccactttatttgttcgtgattatgagcaagtagaaggggctcagctgatcaacatttcttcaagagcgggctatacagtcgtcggcaatgccgtcacctattcagccacgaagttttacgtgagtgcctttacagaaggactggcactagagttgaaagaaaaaggagctaacttacaggcaaaagtattagcgccttccgcgacagaatcagaatttgcaaagcgttcattagatgtagaccaatttgaatatgaaggcaatatcaagaaatatcatacatcaaaagaaatggcagcttgtctgctcgagctttatgatcatgaaaaaacagtcggtattgttgacggcaagacattcgactttgaattgaaagacccgatttttacacatgctggtccaagtatgaaatagaaatgacacatcactgagggcagatttcctcggtgatttttttatggcatgattgactgtgtggtaaccacatggtttagaatgtgtacacaaggagggaatctagtgacgtatgtaacaagtggagaagtatgtaagctattaaacatcacaaagtatacgcttcgtcattatatagaacaggatctcgtacgtcctgcgaagatcgctcaaaatggataccaattatttgatgaaaaagagatttacaccctttatcaaatcctcttcttaaaaaaggcgggcttctctttaaaagatataagcgagacctttttgaatgaacaaagtatcactctgtcctaccaagaaatgctggatcaggtcgagaagcaaatacaggaactaagcgaagtgaaacagcgtctggagcatatgctgtcgattcaaaacagccttcagcttaataaaacaaccatccaagatcggccaattcggtatttaaaacagatcccgcatcatcttctaaagggtgaaacagagctggactttaaacaaatcgttcatcaaaaggagctggatctgtctctttttgaggagagatattatgtgatcaatctgcaagatgacacaacaatttcttattatgtatcaaatgaacgtgattatgatgtgagactggatgcaggttcttacgcggtcaaaagctttttagctggagatgaagagaaggtcattgaagaaattgaggcttttctacatgaagtaccttttacacaagagagtgcacaaccttcttctatcatcttatatgagaatgtaccagtctctgtcacgtaccaaaattcaatggtgtacacagttgaacaaggagcggggaatagaagatgaaaaaaaggatttggctgatcatcgcagcagcagtactcattttcatcgcagcatttgtagtttatgaaaacagctttgctatgaatgaaaaggaagtcgtcatggagactgaaaatgggacattatcaggtatcgtgaccacgcctaagaaagcgccaatcaaaggagttgtgctttttgtacacggggatggtcctcaaaatgccacatatgacggaggatacagacccttaatggaacgctttgcaaagcaaggctatgcatctatatcatgggataagcccggggtgggtcaatcagaaggaaactggctccatcaatccatggaggatcgtgcaaaagaagtagacaatgtgatcaaatgggcgaaaaaagagcctgatcttcaatcaaaacaaatcatcttatggggagcaagccaagcaggctgggtgatcccaaaagtaatggctgatcgaacagatatcacagcctccattcttgtcgggcctgctgtcaattggatgagacagggaaggtactatacacttcaaacattaaaagaagcggatgcatctaaagaacaaattcaaaaaacactcaaaaaagaagatgagcaaaacaaattattagtagaaggcgcagcatttcgcacatatcaaaagaaaacggacgatcaagagatgacaaaagatcgatttgaattcattcaaaagaacatgaaagccgatgccacttcagatatcaagtgcatccaatcaccgacctatttggttttggcgcagaatgaccgaaatgtagattctgctgaaacaaaaaggatctacgaaaaagaagtagcacctaaatggttgcatgttcaaacaattagaggcgtagagcattcaatgctgaatccgctcattcatcattcaaataccctggtcacattagcagcgatcgccgcaccgaaagacttcctgcttagccaagcgtacttggatcactgtgaaaacatactagagcagctaaaaacacctttgcattaggtgtttttttcatgcgttctttgataaaacaaagaatcaaagatccagtagatgagactgctcatgatgacgataggcacagatgccgagctcccaataccatcaatgacaaaaagcatgacaaccattgcaatcagtaaataagcggctaaataaagaggatggaaagcctttggctgcaaagaaaacaacaactgcaaaggaaccgcaaaaacgaaataataaacaaaaaagatgggaatgtaaaataccaggaacgcaggctctccctgaatcggtggatagaagcatacgaacagactgagtaaaatcgaactaaggaatagtgttattaggattttgtgaaatgattgaagcatttgcaatacgtatactccttttttgtaaaatttactatattttatcataaattgatgatctagtattgtttacttttattgattgaacaacctcaatatctcctcttttaaaagtaaagttaggtatttagatgtaaataaatgattgtgataatgaccatttttcctttatttggttctgtatctttcgcctcatgccgatgaatgaaggaatggtataaagtaaaccctatagaaagagatctagctttgaatccatcacatttaagaagagagatgatcgaatgaacgtaacaaaatggttaggtgctgtccttctttctgttttattactgtcgacagcagcttgtgccaatacaagtacccaagagaaaaatcaaagcgaaaaagaaagcgcaactaatcaatcaaaggacaaaacgacagccgtagaaacagggaataagtccttatctaatattaaggtattagcgacaggcgggacgattgctggcagttcggacagtgatacagatacgacaggatataaatccggttcacttggcatcgataaagtcattgcttcagttcctcagctaaaggatattgcaaacgttaccggtgagcaggtagcgaatgttggcagtgaaaatgttgataatgcccttcttttaaaattagccaaacgagtgaatcaactcttaaatgatgatcaggtggatggcatagtcatcacgcatggaacagacacacttgaagaaacagcttactttctacatctggttgtcaaaagtgataagccagttgtggtcgttggctcaatgagaccagcgtctgctatcagtgcggatggtccgctgaacttgtatcatgctgtcaaaattgcctctataaaagaagcaaagggcaaaggtgtcatggtcacgttaaatgaccgaattgcatcagctcgatttatttcaaagacaaacacgaccacaaccgattccttcaagtctcttgagcatggctacattggagaaattgctggtgaagtggtttccttctataacgaatcaacaagaaaacatacgactgaaagtgaatttgatgtatcaaaaataaaagaattaccgcaagttgatattttatacggctatcaaaatgatcataaatacatgtatgatgcagcagtaaaagcaggagcgaaaggcattgtcgttgctgcagcaggaaatggaacgatgtcaacagaagccatcaaaggggcaacagatgcagtgaagaaagatgtggtcctcgtgagatcaagccgtgcgggaaatggaattgtgacccacgaaaaaatggatgatgaacatcactttgtgtcatcggattcattaaatccacaaaaagcacgcattctgcttatgctcgctctaacgaagacaaaagatccagataaagtacagacatattatgaaaaatattaatgaagaaagggacccgaagcttcgggtctttttttatgcatgttcctgatgatacttttcagcacgtgtttttaaagagagtaaaatatctcgccatatatcgtctacatctgtaagaaaatgtcccgcttgatctatataataggttttgacgtttggaatcgttggagccattttttctatttctacaaatggagccatcgtatcttcttttccatgccatacatcaacagggatttgtatatctttcatatcgaatgcccatggctgcgagagcaaatatggttcatgaatacattcatccaccgattgacgagtggcttcgtgtaaatgcatcatcatcatctcgagctgctcatcggtttgaaggaattgacggtcccatggatgtaaatgtttgttcccatttttggccagcttcttaaatttctctggttttttctcaatcatttttttctgggaacgatagcttgctttcaatagccaagggaacttcttactgaggaaaaaagccaatttattctctttcagcatacttttaggcggttttccgtcctgaaatggcgttgtacttgagatcaaagcggctgaaaggactcgattcggcaattgataagcacagccagcagcgaatgcgccgcctccagatacacccatcactgaaaaatgctgaatgcctaaatgatctgctacttccagcacgtcttttgcccagtctaaaatcgtacggtcaggttgaggggtagataaaccaaatccaggtctgtctagacagatgaggcgaacaccgagctctttagagattgggtcatcatctaaaaacatgactcttgatccaggagttccgtgaaaaaagaatactggaaatccttcaagatcaccgtattcacacaaaccaatatgacgtccatcttgtaaatgaatcctacccatattttcatccccttaatagtttatctagcttaaatgttgatgagagaaacaccgaattaaggcgcttctttcgcaatctgatagattttttcgtatagagataataatgtttttaaatcttcttttggaagctttgcatagtatttttgaataaggtgcaattgaatttcttccgtattcttgtgatagtcatgacccttttgagcaaaatcaacaatgatttctcttcggttatgtggattaatttctcgtttgacatagccaagctgctcaagctttgatacaagctggctagcggcacttgccgaaattgaaaagtaatcagctagttcgttgattgttctcgtttttgtccgtaataattcaagtgtcagctcttgtttggctgataaatctgcatactcatgttttaaaaatcgttgatactcttctacatagatagagcctagtgcatttgagtattcaatgatttttttaccgtaatgaatgatttcctcatccaatgacatcacctctattctattataggcaatccttattgttaagtgaagttaaatattaagaattattaaatgatgagagggcataaatgaccgtattgtttgttttcacatgattcactccttatgaattcgatgactttttcattgtattttgaaaaagatccatttataataaaaaaataaaccaactggtcggttttgatttgtccttgcaaagaaaagcaaggtagaagggattgtgaaagatgacaagtacacaaagcggggctggaaagagcgagaagacgaagcaaaaaatcgtcaccgcttctcgtgatttatttgcgaaaaaaggatattcagaaacatccgtgcgggatattctagaggctgctgaggttagtaaaggcaatctctatcaccattttaaaggaaaagagttcttgttccttcatatcatggaagaggatcaccgtttgatgatggagacgtggcatcaggagaaacaaacgatgcaccgggccattgataagctcgccggatttgcagagctgctcagtcaaatggggattaactacccattaatgagagcgagtgaggaattctgtgcaagtgcctttacatcagacgaggtcatggaacggctgaacaagattgatgccgattttgatgatgtgatgagagacatcttacttgaaggaaacgaagatggcagctggtcaattcagcatgtggagtcaaaagtgaaaatattactttccgttttttacggattagacgtgttatataaaagtgacaccatccaacagaagaaagagttacaaaaagaggcgatctcattgtttattcacggaatcaaccatcatgagtaacaagtgagtcagtaaaggagaaacaaacatcatgcaaaaaccgattcgtgagcaaaaagctgtactcgttattttattaagtaatatatttattgcgtttttaggcatcggtctcatcattcctgtcatgccgctattcatgaatgtaatgcatctaacagggagtacgatgggataccttgtggcggcgtttgccgtggctcagctcattgcttcacctattgcagggagatgggtagaccgctacggaagaaagattatgattgtgtcaggactgtttctatttgcgttatcagaactcgtcttcggtcttgggacacacgtgtatgtgctgtattttgcaaggctgctaggcggcattagtgcggcatttatcatgccggctgtcactgcttatgtcgcagatatcacgaccgttcaagaaagatcaaaggcaatgggctatgtgtcagcggccattagtaccggttttattattggcccgggcattggcggatttatcgcagaatatggcgtacgcctgccattcttctttgcagcagggattgcgtttattgccgtcatttcgtctatgtttatgctgaaggagccattaacaaaagaagagcgagcgaaacaaatgggtcaagtgaaggaatctactttctttaaagatttgaaaaaatcgattcatccaagctatctcatcgcctttatcattgtgtttgtcctcgcttttggactatctgcgtatgaaacagtctttagcttgtttacaaatcataagtttggatttggaccaaaagatattgccgtcatcattaccgtcagctcgattgtggcggtcatcatccaagtacttgtgtttggtaaactggttaatgccctaggggagaaaagagtcattcagctatgcctgattgtcggagcggtccttgctttcgtttcgacagtcgtttcaggctttttggttgtactgattgtcacatgtgtcattttccttgcgtttgatttattgcgaccagcattaacgaccttcttatccaaaatcgctggaaaccagcaaggatttgtcgcagggatgaactccacctacacaagcctaggtacgattttcggcccagcacttggcggcattttattcgatcaaaatatacatttcccatttctattcgcaggtgttgtcttatttctcgggttaggcttaacccttatttggaaagggaaggcagaagagcctgcggcagaataacagacaagagacctttattgaggtctctttttttatgactgtggcttcagacgattcaatgcctgtgccattttttgattttgatgctttttgtaaaacagaaaggcgatgatatgaccagtcagtgtcagaaaggcaatgccgatgaaataaggcataatcaattgcagtaaagcagtcgaatataacgcggccgcccctaattgaaaggctaaattgatggcggtgagatgagaatgttgacaggtgcagggatggtaaagtagttccacagtaaagggtaaaaagagtcactgcatgcgcgcagctttttatttataatggaaggaaagaacatgttcgtgaaaggagggagcactgtgcatctcttggagaagcaaaggtcaccatcgatgaaagaaggaattcgccagatcgacccggcatatccagtgtttgtagatgcggtcatggatggtttcatacaagggcatctttatgtagatgatgtagagcacccttttgttttttttcttgaagctgcatgcggcatttattatgttgcaggcaagagagaagcggagctgtcacgctgcttggtcttcattgtggatgtttacgaaagacagagaagacaaaacggccggtttaccgtattttcagcgaatcaatcaacagatgtgatgatgaaaaaatgtcttggttcacatctaaatgagatggaaagacatgcgtacgtttttccgcaggcacattcttatgtccatgtgcctcatccgggctatagagtagagcggacaaatgaacaggtgatcaatgcaagcagggcttttcctcctagctattacgaagcctattgggggagagcggcttgctttctatcaaaaggaatcggagtggccatcttagatggagagaacgtggtgagtgaatgtgtctccattttttcaagtgaagatcgtgtggagatcgatatttggacagaagaagcctgccgggggaaaggtttggcgcagctggcaggtcagcatatgatcaggagctgtcttgaaaataagaggacaccgcattgggattgcgatgtccatcacctagcttcgatcaaactggcagagaagctaggctttcagcggacaaaaacctatcgagtgttttatggctcatgatgagaaggttttgagataccaagcatccatcgcagaatgctcagagccatcaatcggttcagagagaagagaaaagccatatcgctgataaaggccggtggctgcagttaattcctggcgggtttctaaataacatgcttcgtagtatgaagaggcatattgcagcgccgtatccatcagttttttgcccgcaccttttccttgtgcctttggacttaaataaagcttttgtaattcacagatgtcgtttgtaaatggagcaatgcctacgccgcctacaatgtcaccattctcttcagcaatccaataggctgcatgagtcaatgattgatagtattcgaaaagctggtcaaggtggggatcagtgtaggcggttccttcaatcgccaaattcgccgattctagtgactggcggataatcgctgcgatatacggattgtctttttgctcaatgggtctaatgttcattggaagtacctccattgttataagataaaaaagagaatgggagttgaaacaacatgttttggctgcaaaccgctatttttacaatcgttgtattgtgtctctcatggtgggcagggaaaagacgcagacaccgtcatgcggggctaatcctccctatttgcttcattctatttggattggttttattgatatccagtttcttcattggcagatgggaaggcatggcgcttagtatatcaagcgtctctatcgttctctcttccatgatttgtttgaccatcgtcacagcgattcaattttttaaaaaagatgacccttcttaagcgggggcatctccactgttcatctgattgtattcttcacgaaggatgcccatgatgatcacatctgagtaggttccattgaaatagagtgcttggcgtcttttcccttcatattgaaatccggctttctcatagcttctgaaggctcttggattatgggaaaagacttcgagctcaagacgattgagttctaatgtatcaaaggcgaatgcttgaaccatccggacagcttctgtaccatagcccttttggaaatgttctggtccatgaagcgcaatgcggaagcttgccgtatgattaattggatcaatgtccacaatcgccgcatccccaatcatttctttcgtgtctagcagacaaatggcgaaatctcgtctgctgtcatcttgtaaaaatcgggtataggctgaacgaatctcttctagtgtgaacgttttgcgtgtgccagtcatataaagagtttctgcatgctggcatcctctttgaataccaggataatcctgctcttcgatcggtctcaaaaataagcgggtcatgacggatcaccctcctctatatatcgagaaatttcaattaaattcagatcaggatcacggatataaacagattcaatcggacctaatgtacctgtgcgcctgactggcccttcttcaataggaaccacttgcttgcgaaggtgcagcagcagactatccatatctaaatcggtgataaagcacaaatcactagagccaggaagtgggtgagccgctgcccgctcaaattcatgaccagcttcatgaaggttgatcttctgtaaaccaaaacgaagcgctttacggccttctccaaaggtttcttccttcattcctaatacgtttgtataaaagcgaatggtgtcctccatatgttgtacagtcaacacgatatgatcaagtcgtcgtatcatcagtctctcctccaagtatgatcattgattgaactgactttattatatcattacctgaagaggataccttattgaatcacggtgttgaagacatgaaaatggaagatggcaaacccttgtatcctttgtctttcctttctgatacaatggggatagaatatatgttcttatttagggtaaggagtgatgggattgagtcagaaaaggaagctgcttttttatggggcgatgagtatcgatggctatttagcgagagaggatcaccggctcgattggctaatagggacagagggtgaagaagatacgaactatgatgacttttatgcgtcagttgatacgctgatcatggggcgcaatacatatgaacaggttcttcagctgtcaccagatgagtttccttatgaaggaaagacttgttatatcatgtcacgtactttacaagacagtctgaaaggaactcatatcattcgagaagatatcttatcatttgtgaaaaaattaaaagatgtaccaggtcagcatatctggattgtcggcggcggggaactgcttcagtctttcataaaagcaggattggttgatgagctttaccttcaaatcgcacctgtcatgattgggagaggcattcctctgttttctccagcggatatggaatccaggttttcattaaaagaagtacgacaatacaagcagatagctgaaatgcattttgtcttaaaagaagaggatcactgacctgaggtggtcttttttttatgaaacaaactcgttgacaataaaatatcctagtgttaggataaatttatcctagttttaggatttcttgaaaaaaggagtagttgccatggtgcagcatgaatatgaattagacttaaggctattccgcgtgtggatgaaagcctatcaagctctttttacaaatatccaaacagacatcgaacgttatgatatcggatttgaaaactttcagatccttgaattgctctatagtaaggggccgcatcctgtccaaaaaatcagcgacatcctgtcaatcccaagtggaagcatgacatatgtcgtgaacaaactagaaaaacaagagctggtgaaaaggcaatgtgcaccctctgataaacgtgtatttcatgtattgctgacggaaaaaggaaagcaattgtttgacgacatttttcctaaacacactgctgtcatttcgcaaaatctatcctttattgaaaaagaagaaaaagaacggctcattgaattactaaaaaaaatcggtttaggtgcaaaacaacttcacgaaaaggggaaacaagatgacactcagctttgatacattggtacgtgaaagacgatccgcatcaaactttttgccaaatatctcgatttcgagagaagagcttaacagcatttttgaagaggtcaaaatggcaccatctgcttttaacttacagcacacacaatatgtcgtcgtccaaacagaaggtctcaaagaacaagtaagagaagctgcatttggacaatataaagtgcattccgcctcagcagcaattattgtacttggagacccaaatgcttatcagcaagcggggaacatctatgaaggtctgaaaatgcttggcattttaaacacgcagcaatacgaagaaatggtcagagagacgatgagcttttatgaacagagaggagcggattttcagaaagaagaggcgatccgcaatgcttcattatctgcgatgctgtttatgctcgccgccaaaaacaagggatgggacacgtgcccaatgatcggttttgaccctgaagcaatgaaaaaggtgttgaacatcgattcggatttggttcctgtgttaatgatcacactcggaaaagaaaaagtagagagcagacaagcgagaggctaccgaaagcctgtctctgaatttgtgacatatttataagatagggggttccactcatggaactaggaattagtacatttgtagaaacaacacctgattttcaaacaggaaaaacagtcagtcacgcacagcgtattcgagaagtagtcgaagaaattattttagcagatcaagtcggccttgatgtatttggagtgggtgagcatcatcgacaagatttcgctgcatcgaatccagctgtcgtcttagcggctgcggcaacacaaacaaagaatatccgcctgacaagtgcagtgacagtcctttcatcagcagatcctgttcgtgtctttcaggattttgcaacattagatggactatccaacgggcgtgcagagatcatggcaggccgtggttcatttattgaatcattcccgctctttggctatgacctgaatgattatgaagaattattcgaagaaaagcttgatttgctgctcaaattacagcagtccgagcgtgtaacatggagcggacagcatcgcccatctattcaagatgttggggtatatccaagacccgttcaagatccgcttccaatctggatcggcagtgggggaaaccgtgaatctgttgtacgtgctggattattggggctgccgctagtacttgctatcattggcgggagtcctagacagttcgcaccgcttgtacagctgtacaagcaagcggcagtgcacgctggacatgacccagagaaattaaccgtagcgtcacattcgcatggatttgttgcggaagaaacagatcttgcagcagaccaattcttcccttccacacagcatgtgatgaacacattagcaagagagcgaggctggggtccatatactcgttctacatttgatgcagcgagaacgttagaaggcgccctgtatgtaggagatccagatgcagtggcagagaaagtgattcaccttagaaaaaatgtaggaatcacgcgttttatgcttcatgtaccggttggttccatgccgcatgatcaagtattaaaagccattgagttatttggaaaagaagtcgctcctaaagtaagagaagagattgcccgctgggaagcagagcaagcataacgaaaaaggtcgatcaagtgcataggcttgatcgacctttttgatgcttaaggatcaataacacaaggtttcactgtaggacatgaagcagcagaagcaagtggtgtggtcgtcaaggtgaagaggaaaacaagttgaaaacagatgagccattttttcatgaaatcacctccgttcacaattgtttgacggaatgagatgaggataaaagcatagaagtatagaacactctctatccaacataagacaatcatatcataattttcaaaaaaatgaaaaaacaacttataaaaggactaaattatggtatggttaatatgttcaacaaaaaaagggagggattttttttatgaaaaaggtcatgtcttcagttttggttggagcaattgtcttaacaggtgccggggtcacagctgctccagtggaagcaaaggagcaaacaaaaagtgaaataaccgttcaggcgagtcgaactgtctcagaaacaagaacgtatacgacctcgaacatcccagaaagtattgtctatgcaaaggatggctgggtcggtattttaaaacaaacctctattgaagaattaggattaggaaaatacagagtcacatttactggaacggttgtacgtgatccgggatttaattaaataaaacgcaaagctgacaggtggacaagcctgtcagcttttttcatgaggataataaagaatcatttgcagccgtaccatttgttctccggtttgtttatatgcatgcgaacggtccgctttaaaacgaatggagtcgccggcctttaagctgtactgctcatcaccaatggatatatcaagcgctccctcaaaaacagtgatcaattcctctgttccgccaatatgttcattcgcatgcagcgacccgccaggatcaatttctactcggtacacttcaaattttccccggtcatcaaagggaaaagtcgtatacacgcgatatctcccgtcatcttccgttaaaatctgtgcatcttccttgcgtaccaccttgatttcaggctgtggtgcgtaaatgagctcactaaaagacacctttaatccgttggcgattttccacaaagtcgtgatggtaggggttgattctcctctttcaatttgtccaatcatggttttactgacaccagttaattctgccatcttttctaggcttaattttttttgatctctaagaagcctcacatttttagaaataatcgattgtacatcttccatgaaaaaactcctttctctatttactttataaagaccaaacgttacaataaaacgtaacatacgtaataaagtaattaaagtcttaataacgcacgagggaggcggcaacttgattctttctatgttgatctatgcttttgtgagcagctttaccccggggccaaacaacatcatggccatggtctttacgaataagtatggggtcaagcaaacatttcgattttgtttaggtgtgggtatcggatttctcgtcattttgtgtttgagttgcttctttaatatcattctttatcaagtgatgccgaaaataggctgggtcatggcgttcatcggagccgcatacatgatttatttagctgtcaaaatcatgaaaagtaaaggcggggatgacgaaacccttgaccgctacaatcattttgttcctggtatgatgctgcaatttatcaacccaaaagcgatcttgtatgggttgaccgtgatttcaacctttgttttgccatatggacaatctaatatgcagtatgtgatatggacattgattctcgcacttattggctttctcggtacattcagctggagcctatttggctctttatataagcgctttttgactgcttacgaaaaaccgttccagtttgtcatggggctgcttctgatatacagtgcgatttcaatggtatggggctatgtgatgtaagtagtcagaagcttggcctctgcctgcccatcacaacagtattgtaataaagtccatctgccagccgtttatcattttttaataccccttcaatcagaaagccatggcactcatataaccgaatggctttttggttggtttccagcacgtgaagtgacatcttctggatgccttgctgatcagcccagtcaatagaagcggctaaaagctctttgccaatgtgatagccccaggcatccttttgtatggcgatgccaaatgtcactttgtgagcagagcgcttgagtgaatgtccctcacatctagagaaaccgacaatctctccttcaatatcagcgaccaaaaataaatgcctgctttgtttggcatcctcttgaatcaaaacctcaaaatctttttcatgaagaaaggcttcgcctggttcacggtctaaatattctgtttcaccatcaattttcagtctgagagctgataactgcttggcatcgccaattgcagcagaccgaatacgataggtcaaaccacgaacggtgaatatgttttcagagatgatcattgaacagagcaccaacctttctttccattatgtctatcatacctgaaacgtgtacattgcaggttaaagcttttaagcctgtcttatagataagtattttttaatccagctgaccctgtctggatcttcatgatttagactgagaacttaaataagcttctctcacaactgttaaaaagtggtcagcgacggttgatgtatcatcttgtctccatgaaacatataaatttacttttggtgtagtttcttggatttttctataaacaacccctgcgcgttttacgctttctactgaggatggaaccacagagattcccattcctgcagcaactaaattaacaatcgtatgcatttgaatagcttcctgaactacgtttaaacttatgctattttcccaaaagtagctgataattaaatcataaaatgctgcacctagatgacgtggaaacatgataaatggttcattggctaataaatgaattggaactttgggaaatgaagctaaaggatgattttctggcaaaaccaagcttaatgattcctcacaacaaatttctgaggtaagtatcttattattttggttagaacgaataaatcctatttgaatttctttcttatatagtgcttttaactgctgttctgtagccatttcacataagacaagatggatgttagggaaattttctcgaaaccttttaataatatcgatcacaatatcagtagaatctacgaaaccgatcgttaactgacctatccttccgtcatctgcaagttgtgttgctttaatcgttctatctacttgaagaagcgtacggcgggcttcttctaaaaatactctccccgaatctgaaagtttaacctgtcttttcgttctatgaaaaagcgtaacacctaactcttcttctaatttacgaatttcttgacttaatggaggctgtgccattttaagacgttcagctgcccggctaaaatttagttcttcagcaaccattataaaataacgtatttgtctcagatccattttttatgccccccctataaatttcatacttgcttattgtgtaaaatgattacaaaggattgttattaaacagttttgcgcttttttaatggaaatatttttaattatataaaatatatatatatttatctgaatatatatattatacatattaacgacctctttttataatgaaagtattctttcaaaaggagggcattgttatggagtatagtaaacttggatctagtggattaacaattagtaaacttgcttacggaaactggattaatcatggtggtaagataaatgaagaaactgcccatgattgtgtgaaagctgctcttgatgttggtattacgacgtttgatactgctgatgtttattcagacaccaaggctgaagagatactaggcaggtctttaaaagggatccggcgggagagtattgaactttgtacaaaagtatgtcatccaactggtactgggaaaaacgatagaggattatcacgcaagcatattttggaaaactgtaatgcctctttgcgacgtttacaaacggattatattgatatttactatgcacacaggtttgatccaactacacctctggaagaaacgatgttagctttcgcagatctagtaagacagggtaaagtgaactatattggtgtaagtgagtggacagcagaacaaattactcgaggggcagcgcttgcacgagagctaaatgtcccccttatcgccagccaacctcaatactccatgttatggagaatcattgaaagtgatgtaataccgacctgccagcgtgaaggacttggccaggtagtatggtcgcctttggcgcaggggatccttactggaaagtatctcccaggaaaatcacttccgactaattcgcgtgctaactcatctgctggaaaacctttttttaaaaaccttgctcaacgctggatgaataataacaccttagaggcgatccaaaagcttaagcccgtcgcacaagaggttgatcttactctcgctcagcttgcgatagcatgggtactgcaaaaccagaacgtttctgcagcaattattggtgcttctagtccagaacaggtgagggagaatgctttagcatctgaggtgaaaattgaaactgagatgatgaatcagattgacgaaattctaggtgatctggttgaatacgatcagagtaaaacaggttaaagcttttaagtctatcttatagatcattatttttaatccagccgaccttggctggattttcatgttgctgtagtttcttggatcgcacactcagatgttttgtatctctcaaaaaggctaaatgaatagtatcaaacgtggaggtggaacaaatgagtgaagaaaaaggacatatggataaagcgaaaggaaaaacaaatcaagccaaaggtcaagtgaaagaaaagcttggcgaagcaacagatcatcaaaatctgaaatcagaagggaaaaaggatcaggcaaaaggaaagcttcaagataaaaaaggggatgtgaagaataaactaaacgagtagctttcagaaagctacataaaccatctaaggcatgccctgatgatgaattcctgataagaaaaaagcttaaccacatgcggttaagctttttcttttagaaaaaccatctagcagttcccatcagcatgacgcctacaagaacagtaagtgacaagctttttgtccaaatagcgatcagtacggtcggaactaagacagcaaggtacatccagtgaatggtgacgcctgttgtggtatgaatgaacagatgctctgcaatcaaagctgtaaagatacaaatgggaataaacgataaccacttaagcaccacttcaggcagctcgatacttcgtacaaataaaaagggaacgacccttggaatgacggttacaatcatacagccgagaatcagccatatcataaaactgctgatcatttatctgtcaccaccccaatggttgcgacaatcatggtggctaacagaacagccacgtgtgagggaacaaaatgaagcagaacaaacattgcaacgaccatatacaaaacaagtgacaggcgatgggttaacttacttttaggcacagtttgcaaagaaagaaccaacagcgcagcaaacatagcggaaagggcaaaatcaagaccaagggcttcaggatttgaaatccagtgtccaaaaatgccgccaagtatacaggcagcaatccagcacaaataagccgttatgttcagcccatgcatccaccgattattcagcttgccatgctgggctaatttattcatggctacgccaaaggattcatcagtcagcaatagaccgaatccaatgttttgtttcacagagtagcgtgtaaaatgaggagccagcgtcaggctgagcaataaatgacgcagattcacaataaatgtagtgagaataatagcggaaaggggacttccagtgacaagcagtgcacagataataaactgtgaagcacctgcataaataaagattgatagaagcgcaatgtcccataagctcaactgtgcgctaattccaacaattccgaaggcaaacccaatactcatataaccaagcagggttggcacacaatcttttattccctcgagaaatggttcatgctccgtgctgggaatgtgttttctagcttcaatatccaacgacctctactccttttctgcgtgaccacctatagttttacttactatatgaaaacgaattcagcatgtcaatagccgcttatcttctattatatgaagaaaaaaggtgacaaaaaaggattgaagtcaaccagaatttgttataaagtatcagaaaataaaaataattggagtgacggcaatgctatggaagcctttgtttgaacatgatgttccaaatgccctccgtccataacggagagtgatctccgtttgtggatatggtcatcaaaatatccagtaacggagggaaaaagatgaatgaaaaatatataggcgccctttacctagcaatcgctgcaagtatttggggcggcatgtacgttgttgtcaaagtaacagtagcggttgttccgccacttgagctcgtttggatgagatatgctgtagcaggagtcgttttggtgttcaccatttggcgcttgggctattcctttcgattagataaaaaagatatcccacttatagtggtgattggactgatcggaaattttctttccatcgtgacccaagaaatcgggacgatgtatacgtctgcacaaatgggggccattatcacatctgcaacacctgcgtttatggtgctgtttgcgttctttctattaaaagaagccatgactgttcgaaagtgcgcatccatcctgcttgctacagcaggtgtattgctcatgattggaccagtcgcagtgcaaacagatgaatttgttggcggtctttcattggtcatcgctgctttaacatgggcgcttatgtctgttttgctaaaacgagttccaggaaaataccctcaggtggtgacaaccacatatgcgatcatcattgcattcattgttttaacaccgccagtattatttcgtttacctcatctagatgtggagcagatggcaaggccggagatttggggcggtattctttatctaggcatcatctcaacagctctagcattttttttatggaatagagggcttcaattaatggatgcctcaagcggcggtttgttctttttctttcaaccgatcgtaggtgccgttcttggctggctgcttttgggagaagaaatgggattacgctcattcattggcattctatgtatctttacaggtgtctatactgtgctgcgtcaaaaggaataaaagaagatgtctcttgtaataggggcatcttctttataaatgagagattgagagaggatggagggaaataggatgatacaatatccacaattacaaaaaggacaaacgattggtgtcacagcaacatcctcaggtgtacagccatctttgcatgacatgtttcagctctcatgcgaacgaatgaaaaaaagaggttatgatgtcatatgtggagagacggtctggaagcaggaaaaggcgaaatctgcccctgccgtagaacgagcaaaggagcttcagtacatgatgacatgtgatgagattgatcacatcatcccgccatggggagggcagcttctcatggaagtgttagagcaccttgacttctcatcgatgcaaaaaaagtggattcttggttactcggatacgagtgctcttctgctggcgttgacattaaaaacaggcattgctacagcgcatgggccgaacttagtggatttacgaggggaagagtctgatcaaacgactgctatgtgggaaaaagtgctttccacagaagaggagatggacattactcagttttcttcatataagtatcaaaaggaatggcagcatgacaccccgagtcaacatgtctttcatttaacagagcctacaagatggcgcacggttcatccgcaggagatggcggtgaaggggagactgatgggaggctgcattgatatcatacgtcacttagcggggacaccttttggagacgttaaagcttttcaggaaacattcataaaaggtgaaccgattctctggtacttcgaaaactgcgcattaaatgctaccagcatgaagagatcacttgttcaattaaaactagccgggtggtttgaccactgttcaggtatcatgtttgggcgaagtgcagttgatgtgccagtggaagggtatcaatatcgggacgtatatgaagaattacaaaaggaattacaaatccccattttctacgatatagattgtggtcatgtcccgccacaaatgacgctgattaatggcgcatatgcagaagtgcagctgcaacctcaaggcaaagcggtcctaaagcaagcatttttatcataagaaaaggaaaggggaacccctttccttcatataacattacatcccttttgtttcctcacctgcttttggaacttcccatgcggactcacggaatactttttcccatttcgatacgacaatacatgcaacggcatgccctggaacattcacacctgttcgtgccatatccataattcgatcaacaccggcgataatggcgacgccttctgctggaagacctactgcatgggcggttgccaaaagaacgacgagtgaaccggatggcactgctgcaatccctttacttgttaacacaagaacaagcatcatcaaaagctgctgtgacaaactcatgtcgacaccaaacgcttgtgcaagaaacacacaggaaaccgataaatataaacttgatccatcacaattgagagagagaccagatggaatgacaaaggagacgattctttttggacacccgtatttctccattcgtgacataagctgaggaaggacagtttctgtacttgtagtagagaaggcaactaagaacaaatcccaaatcatttttaaaacttcgaagtagttaaaacggaagatcagtgcgaccagagggaacaaagcaaagagaataatgaataatcctaaaaatacagtcccgacaagcttcatcattgggattaataaaacaatgccatattggccaacggaagcagccattaatgcaagaactccaataggtgctgtcaccatgaccatctgcgttagcttaaacataatttgtgccactgattcaaagaaggtgagaacaggagcggatgctttaccgatgccgcttgcggctacaccaaataatatggcgaagaaaatgacagcaagtaaatcattctgagccatgacatcgacgatattcgttggaatgatatcgagtaccatttgtttaaagtcgacgactttctgcgtatagccatctaattcaccaatatctttcttagctaatttagagaaatcaaggccaacgccaggctttagaacattagccagcaatagaccaattcctagaacgatggttgtgatgacctcaaaccaaatgatcgtctttaatcctaggctgcccattttcttcataccgccactgccagctgcaccaataacaatggtagagaaaacgataggaacaacgatcattttaatcaatctgatgaatccatctccaattggccgcagtgccatcccgaagtcaggaaagaaatggccgataagagctcctatcaccaaagcgatcatgatttgaaaagcgacgaactttttcatcatctcctacctcctttaaatgcttggaaaatattaagaattttccaataaataaaaattctatgtgaccatgttttgtcctcctttggatttagaaagattttatttaagaatcattagaattatgaagaaagagaagaaaatagggctattgcatctctatttatctaagaaaaaaccacttcttaaaaaatatgaaactttttcagaaaaatgtattgacccatttatgtgatccatggtatatttttattcgtcgctgatgacgtatttgaaacaaagacattcaaacacatgcgacaaacaaattttaaaaagatgttgacttgataaaaacgatatgttaagataattaagtcgcctgattaagcgcccgtagctcaattggatagagcgtttgactacggatcaaaaggttaggggttcgactcctctcgggcgcgccaatacaaatcacgcgggtgtagtttagtggtaaaacctcagccttccaagctgatgtcgtgagttcgattctcatcacccgctccattttgaaacgtgacttgtaaacgaaaacgtatagtttcgtttttttttatgtctttttcttttcgtacgtatccaagatgcaatgaattggtttgtgtttggctacacgttatgtgaaaagaaaaagatagatcacttcaacccagcctggttttttcataccaggctttctttatatcatttttaattggaattgaaactcatattggcttacactaatactaattatgtctgacatcgtgtctactcaatcaattgattgcatgaaggggctgctttttatggatgaatttgatcttattcgccgaattacaccaaaagaaacacatcagcgttctttggttatgggcatcggtgatgatgcaagtgtttatcaacctcattcacattgtgaagaggtcgtttgtgttgatacaatggtggagtatgttcattttcgctttgatttttccacaccttttgatattggctttaaagcactagcggtcaatgtcagtgatatcgccgcaatgggaggaaccccaaagtattatcttgtatcgattgcgatcccccctcatggtgatgagacgatcgtctcagctctttacgagggaatgaaagcattggctgacacctatcatatggatttaattggtggagatacagtcgccactcgcagtgactttgtcattacagtgacggtcattggcgaggttcccaagggaacagcttgttatcgtcacagtgctcaggcaggagacgtcgtctttgtcacaggtgagcttggttcatcagctgctggcttatcacttttaatgaacgaagtaacccctaccaaggcagtcgacatagccttttttcttgagcgtcataaaaagcctcagcctcacattgctgctggacatatttgctcaagcttcccacgggtcaccttgaatgatgtgagtgatggattagcgagtgagctgaatgagatagccgaagcgagtcatgtgacgatagagatagaagcaaacaagctccccacacattcagatttaccagtgctgcgtaaagactggctggaatgggtgttatttggcggggaagactttgtattaactggtacgattccagaggctgattgggaaagctttgaaatgcaatgtagaaaagaagacattcaagtcaaacgcattggacaagtcaaaggtgatcaagcagcaagcgttatattaaaagacaatgaacagcaaacaatgttaatgaaaaaaggatataatcattttaagaaatgaggtgacataactgtgaaattaacatggacgacaaaaggtgcggatgagacgaaacgaattgccgctgctttggccaaacttgtgatgccaggcgatgttttgacattagaaggggatttaggtgcaggcaaaactactttttcaaaaggttttgcagaaggcttagggattacccgtatcgtcaacagccctacctttacgattattaaagaatataccgatggcagactgccactttatcatatggacgtgtaccgcatggaagatgcggaagaagatattgggctcgaagaatattttgagggcgaaggtgtatgcttggttgagtgggcacatctcattggacctcaattgccttccacctatttgaaaatagaaatgctgagaacagaacgtgaagaagaacgtcatctcacgtttagtgcaaaaggggaacgctataagaccctttgtaaggagatgaaagaatttgaccatactggcaattgatacgtctaaccatacactaggaattgcccttgtaaaaggttccacagtgattggtgagagcatcacgtatttaaaaaagaaccattccgtccgagcgatgccgactgttgaggcattaatgaaagaatgtggtgtagcgccaagtgaactaagtaaaatcgttgtagcgaaaggacctggttcctacactggtgtccgaattggtgtgaccattgcaaaaacactcgcgtggacgctgtctatcccgatatcggctgtttcaagtttagaaacacttgcggcaaatggtcaatactttgatggatggatctcgccactatttgatgcgagaagaggacaagtttatactgggctatatacgtttgaagaaggaaaaattaaagagatcaaaccagaccaaaatatcttgctcacggattggcttcatgagctgaagcagacaggaaagcctgtcctatttcttgggcaggatgtgcatcttcatgaagagagcattcgctccattttaggagaaactgctgtgatagcagagggagcttttcataacccaagaccttcaatgcttgcgtttttagggacagatcgtcctgctgaagatgttcatcagcttgttcctaactatattcgtttggcagaagcggaagtgaaatggcttgaaggacaaaaataatctcaacataacagagattcgaaaaatgacggtagcggacattccagaggtgtatacgattgaagtgcattcatttactgcaccttggaaaaaagaatcatttgtctatgagattctccataaccagtacagccattatttcctcattgaagaagataaacagcctgttgggtattgcggggtctggatcgtcatggacgatgcacaaattacgaacattgcgattctccctgagcatagaggaaagggctacggggaagcattgctgcgatatgtcatggaattttgcaaagaaaaaaagacagatcatctttctttagaggtgcgggtttcgaatacacctgcacaatccctttatgaaaagcttggtttcagaccagcttctattcgaaagaattattatacggataatggggaagatgcattggtcatgtgggtgaatataaatgagtgaacaaacagatcgattcatattaggtatagagacaagctgtgatgaaacagctgcatccattgtaaaaaatgggaaagaaattgtggcgaatgttgtggcctcgcaaatagaaagtcataaacgatttggcggtgttgtaccagaaatcgcttcaagacatcacgtggaacaagttaccatcgtattggaagaagtgatgacacaggccaatatgagctttcaggatttagatgccattgctgtcacagaaggaccgggcttagtcggtgcccttctgatcggtgtcaacgcagccaaggcactaagctttgctcatcagattcctcttgttggtgtacatcatattgctgggcatatttatgcaaaccagcttgtagatgaattacagtttccatgtttggctcttgttgtctctggtggacatactgaacttgtgctaatgaaggagcatggatcttttgaggtcatcggagaaacattagatgatgcggctggagaagcctacgataaagtggctcgaacgatgggtctcccgtatccaggtggacctcatattgatcggttagcacatgaaggagagccaacgattaaacttcctcgtgcatggcttgaagaaggttcctatcactttagctttagtggattaaaatcagctgtaattaacacattacacaatgcatctcaaaagggagaaacaattgctccagagaatttggcagcaagttttcaagcaagcgtcattgaggtgcttgttgggaaaacattaaaagcggctgaggcctatggcgtaaagcaggttgtcctagctggtggagtcgctgccaataaaggactgagagaagctttgacgacagcattcacaaagctacctgacgtgaaggtcattattccgccgttatctctttgcacagacaatgcagccatgatcgctgctgctggaaccattgcgtttgaaaagggaataagaggcgatatggcgatgaatggccagccgggcttaccgcttgtctcatatgaatgaaaactcctgtggatacacaggtttttttcattttcaatgaaagcgatttattcacatgtaaacgttatatatccacaattatttgaaaattttgttttaaaatgaagagaatgtgtataaaaaagaaattttgtgtggatatgtgattaaaaacctgtggataaagtggataagtccaaaatttttaagaataacaaagaggtttttgtggatattaatgtggataataaattttcactgaaagaaaaaagagcacccatttgggcactctttaagattcggatagctcttcccactccgcgaaaagtgattcaagctcttgattaagcgtatcattttctgtttgaatgtcttggaccttctcatgattttggaaaatagcaggatcacatagaagctcttcattttcaccaagtttctcttcaatgacagcaatccgcttttcaatttcctcgattctgcgctgcttttgcctttctttctttttcagttctttttcttccgcataagaaagctttgctgtttctactggctttgctgcttgttttttaagcggttcattttcttgaagcgcctcaagctctaattgttcatttttcttttcaaggtagtagtcatagtcaccaaggtattcttttgtttccactcgcgacagctcgaatactttcgttgctagtcgattaataaaataacggtcatgcgagacaaataagatggttcctggataatcgatcagcgcattctctaaaatttccttactatctaagtccaaatggttcgtaggctcatcaagtattaggaaattggctttttggagcatcagctttgccagggcaagccgggctttttctccaccgcttaatgcatgaacgggctttaagacgtcatcaccagaaaaaaggaaattccctaaacatgtccgaatttctttttcattcatatgaggatagtcatcccaaagctcattgagcacttttttggaggatgtcagtttggcttgttcttggtcatagtagccgatcgtgacatgagatccaaaggtgatgtcgccttttacaggcgttaatgtgttcgttaacgtttttaaaagggttgatttcccgatcccgttaggaccaatgagtgccacgctatcctcacgtttgatctgaaaagaaagggaggataggagcggtgttttttcatcataacgaatgtcgagatcatgtaccttcagcacatcattgccgctttgtctcgtaatatcaaaatgaaagtttgcggatttttcatcacctaatggcttatctaaacgatccatccgttccagctgcttgcgtctgctctgagcgcgctttgtggttgaggctcttgccaggttgcgatctacgaagtcttggagctttgagatttctccttgctgcttttcgtagagcttcatatcacgctctagctgctcagctttcagttcaagatacttactatagttgcctgcgaactttttcatggcagttcttgagacttcatacacatggttcaccactttgtctaagaagtagcggtcatgggacacgatcagaatggcgcctgtataattttgcaaatattgctccagccatgataaggtatcaatatctaaatggttggtcggctcgtccagaattaagagttctggtttcattaataagagctttccaagcgctagacgggttttctggccgccgcttaaggattgaacggttgtctcatcttcaaagtgactaaagcccagcccatgaagaatggagcggacatctgcttcgtattgatagccgccttgatctttaaattcctgctgcagtctgtcataggttttcatgagggaatccagctcagaacctgtggaggaagccattttctcctcaatgattctcatctcttgttctatcccttttaaatgatcaaaaaccgataataattcgtcttttaacgtacgtgtagatgtcacatcggtatgctgtgctaaatagccgatcgataggtctttcggtttgatgatctcaccttgctcgtaagacaattgaccggcaatgattttcaaaagcgtggatttgcctgcgccgttacgacctacaatggcaatccgatcccttgctttgacttctaattttatattcgttaaaacggtatcagcaccaaacgatttggacagctgattcacttgtagaatcatcatgtaacttcacctctgctataatatgttaagtgtagcttatcagcagtaaaccggcaaatgttacatacaatcgccatattcaaatgaaagacagataggaaaaaatagtgtatcatttgagtgagggagcgttgaaagatgagtcaatttagccactttaacgaacagggaagagcaaagatggtcgacattagtgacaaatcgtctacagtgagaaccgccgttgctgcttcaagcgttcgtatgataaaagaagtgtttcataaaatacaacaacgtgaaattggaaaaggggatgtgctgtctgttgcacaggttgctggcatcatggcagcaaagcaaacatctaccatcattccaatgtgtcatccgcttgcactaaaaggcgtggatatctcctttgattgggaggaagacggaaatgcgtacattctgaacatacaagtacaggtgaaaacaaaaggaagtacgggtgtggagatggaagcgctcacttctgcttcagtatgtgcactgaccgtttacgacatgtgcaaagcgattgataaaggcatgatcatcggtcctacctatttaattgaaaagacaggcgggaaaaacggtgattttcacagagcatctgatatttaagttggaggaccttatatgaatatagatcagtcaaaaattccacaagcgacagccaaacgtttgccgctatattaccgttttttaaaaaatctgcatgcatcaggaaaacaaagggtgtcatcggcagagcttagtgatgcagtcaaagtggattctgccaccattcgccgagatttttcgtactttggtgcacttgggaagaaagggtatggctataatgtcgattacctcttgaccttcttcagaaagacacttgaccaagatgaaatgaccaatgtcatgctcatcggtgtcgggaatttagggactgcttttttacactataatttcatcaaaaataataatacaaaaatttcaatggcttttgacgtcaatgagagtaaaataggaagtgagataggcggcgtgcctgtctatgatttggataagcttgaagagcatgttcaagaggtaggagatattcctgttgccattttgacagtacctgccgtagcagctcaatccattacagatcgtttgattgcccttggcatcaaaggaatccttaactttacgccggctcgattgaatgtgccggaacacattcgaattcatcatatagatttggcggttgaacttcagtctcttgtgtatttcttaaagcattactctgttacacaggaggattgacgaaaaggggtaaagggggtggagcaaatgggtccgattggtcctggaagtttggttctgattgcgattgttgcgctcattatttttgggccgaaaaagcttcctcaattaggaagagcagcaggagatacattacgtgaatttaaaaatgccacaaaaggtttagctgatgatcaggaagaaaataagaaaaaagaagatcagtagaataggatgagcttcatgaatgtcaaagatatgccgcttatggagcatattgtggaactgcgaaaacgtttagtgatcattgcgatgttttttgttgcctttatggtggcaggtttttttctcgctaagccggtcattgtgtatttacaaaatacggatgaagcggcgacactgacgctgaacgcgtttaagctcacagatcctctgtacgtgtttatgcagttcgcatttgtcattgctttggttttgacgtgtcccgtgattttatatcagctatgggcatttgtgagtcctggcttatatgataaagaaagaaaggtgacacttgcttacattccgattgcactgcttttatttttgagcggtgtggctttctcttattttattttgtttccctttgtcgtcgattttctgatgcggatgtcgaatgatttaaatgtagagcaagtgattgggattcatgagtattttacatttctgatgcagttaacacttccatttggctttttgtttcagatgcccgttgtgttgatgtttctcacaagacttggcatcatcacaccgatgtttttatcaaaaatacggaagtatgcctattttgtcctccttgtcattgccgcactgattacaccgccagagatcgtttctcacctcatggttaccttgccgatgctcgttttgtacgaagtgagtattgtcatttcgagagtgacctatcgcaaaatgcagcaaacagagacagaggagaaagaaaattatgatgtctcataaaaaagcatcgtgatccaaataagggtcacgatgctttttctattgtgaaaggaattgattgatcgcttgaaatagatgttgataataggcaggctcatgcgggacaaaatcttgtacacagactactctgttttcctcacgttgttcttcggcttcatccacttcaaagccctccagatgaatattttcacattttctcatgaaaagctgctgtgcatccattagctttgctctgtaaagtccagcgacttcttctttttgtaattgaacgttcatctcttcttcttgatgaatgtaaagatacacatggctaaattcacgatcgatgaaatttggcagatggatttcatcctgtataactcctgcaaagttcagatcctcaaaagggatagaaagaccaagctcttcttttacctctctcataccgtcagaaggctgttcatttgcaagaaggtggcctgctgctgtgatatcaaacagagcaggaaaatctttttttgcggggcttcttagctgaaaatagagatacacggtgtcatgttcctttttgagaagccagaaatgaaaggtttcatgccaaaggccttgggcgtggacatctgaacggggtgcaactccaatcgcttcatgctgctcatttaagatgttcagtttttcttgttccatgaaaacttgtcctccataaaaaaaccattttccagatattagaaaatggtttttgatttatttttgctgctgttttttgagtttgacagagaaggcaaacattttaaacgcgatattgatattataggccgcaaacaccatcagcaaaatgctgtaaaatgaccacatgtcacctggattttgaatggccatataggtgaaagcaacacctacggcaaaataaatgacgccccatacgacagggtttctcatgagaaaaagcctccaataatcatttgcattgtttgagattgttcttcaatcatttttctaactggctcaatctgcacaagaatgacgagcgagttcatcagcatatgtgcaccgattggaacgatgatacgttttgttttcgcatataaaaaggcaaatgtaaagcccattgcagtataaagtaagatatgagcaaaatcattgtgtacagctgcgaataccactgaactgacaagcgctccaataaagaagttcgttttttcataaatcacaccaaaaatgatttttcggaaaatgatttcctctaatatcggtccaatcagggcgatgacaattacaagccatggaactgcatccataatggataagatggcttgagtattttcggattcacggccaatgccaaatgcatattgttcaatcgctcctgcaatcgattgtgcaaagagggaaagaaagaaaccgccaatgatccaggcgatagctaccccgactgaaaccggtgcttcatttcgaagtgaagcttttggtacagtccgaagaatgagcagaataatgattagtccaatacagaagctaataattgtccatgtacctgacaatttagagagctctgcttgtgtcatcggtgtctgaatgaatcctaaccatttcatgatgaacacataaggaatcgcagaaacctgcaccaatatatacgttaagatgatgtaccaatattgttttttcaagtaacgaaaacccctttactaaaagaactagatttattgtaacacaagtcttctttttcgatgaaaaggaaagaatctgagttgaaaaaagatcatgaaagcgtaaaaatttttaaaggtttttacttgaaattacagaagacattctttattataataaatgtgttagcactcactggtgatgagtgctaaaaaagactacatataaaaattgaggaggttgtttcttatgttaaagccattaggcgatcgcgtaatcattgaactcgttgaatctgaggaaaaaaccgctagcggtattgtgttaccggattctgcaaaagaaaaaccgcaagaaggtaaaattgttgcagcaggttcaggtcgtgtacttgaaagtggtgagcgcgttgcgttagaagtaaacacaggcgaccgcattatcttctcaaaatatgcaggcactgaagtgaaatatgaaggcaaagaatatttaatccttcgtgagagcgacattttagctgttattggttaatcacataaaaaaacattgagatatatttctaaaaagactgaggaggtttcgttattatggcaaaagatattaagttcagtgaagaagcacgtcgtgcgatgttacgtggtgtagatgcacttgcagatgctgtaaaagtaactttaggacctaaaggacgcaacgtggttcttgagaaaaaattcggttcaccacttatcacaaatgatggtgtaacgattgcaaaagaaatcgaattagaagatgcatttgaaaacatgggtgcaaaacttgtggctgaagttgcaagcaaaacaaacgacgtagccggtgatggtacaacaactgcaacggttctagctcaggcaatgatccgtgaaggtcttaaaaacgtaacagctggtgcaaaccctgttggcgttcgtaaagggatcgaagaagcagtgaaagtagcacttgaaggcttgcacgagatttctaaaccaatcgaaggcaaagaatcaattgctcaagttgcgtctatttctgcagcagatgaagaagtaggcagcctaatcgctgaagcaatggagcgtgtaggtaacgacggcgtgatcacaatcgaagaatctaaagggttcacaactgagcttgaagtggttgaaggaatgcagtttgaccgcggatatgcttcaccatacatggtgactgattctgataagatggaagcggttcttgaaaatccttacatcttaatcactgataaaaagatcacgaacattcaagaaatccttcctgtacttgagcaagttgtacaacaaggaaaaccattattgatcattgctgaagatgtagaaggcgaagcacttgcaactcttgttgtgaacaaacttcgtggtacattcaacgcagtggcagtcaaagcacctggattcggtgaccgtcgtaaagcaatgcttgaagacatctctgttctaactggcggagagttaatcacagaagacctaggacttgacctgaaatcaactgaaatcggtcagcttggccgcgcgtctaaagttgttgtgacaaaagaaaacacaaccatcgtagaaggctcaggagattctgctcaaatcgcagcacgcgtcaaccaaatccgtgcgcaagtagaagaaacaacttctgaattcgataaagaaaaattacaagaacgtcttgcaaaactagctggcggcgtcgctgtcatcaaagttggggctgcaacggaaacagaactaaaagagcgcaaactacgcatcgaggatgcactgaactcaactcgtgcagcagttgaagaaggtatcgtatccggtggtggtacagcacttgtgaatgtatacaaaaaagtcgcttcaatcgaagcagatggtgacgttcaaacaggtgtaaacatcgttctacgttctcttgaagaaccaatccgtcaaatcgctcacaacgcaggtcttgaaggatccgtcatcgttgagcgcttgaaaaacgaagaaattggcgtaggcttcaacgcagcaacaaacgaatgggtaaacatgatcgaaaaaggaatcgttgacccaacaaaagtaactcgctctgcacttcaaaacgcagcttctgttgcagcaatgcttctaacaactgaagcagtcgttgctgacaaaccagaagaaggcggctcaggcggcggaatgccagacatgggcggcatgggtggtatgggcggcatgatgtaatcagggtttcaaaaccttgttatatcaacgtctgaaataataatatgcttttcttgtcgtcgtatttgtccttgtgttattaaaaacaaggcaacctgtgacaaataagctaactatagaagaaggcctttcatcagtttgcaaaactgttgggaggccttttcttccatattaacagtcatatgagcatagatattcctataaaagagaaaggctactctcgaagtttttaaaccactggttagttgctatcaatgtttaaacaacctatagtaataggagcttttaaatctgaggaagatatttttaggtatattaaaggaattgatcttctagtgctgatgatgttggctcagaggcaatcgatgggaatggaaaaatatagtgactgtaaagagagtgacggagagttttcaatttgtagaaagtttaaagcttagcaagaaaagagtaaaccctaaaagtctactctttaatgtttaatcatcttatgattagcaatcttctgctttgctatgatgaagaggtggtggaattaaccatcctttttctttgttaagtctaagggcttttgctccaagtgctgtcttttgaacatgaaactgtccaaacatcatagctatgtcttctcgaatggattgccccataattgtgctacacgatactaagcctgccgcaatgttcgccgaaagaccagcggctatttctggatcttgaaaacgtgcccctactggaatatcgtctatacaagctttaggtcgttcaggaggtgttggaggtaagccgattccattttcttttaataaagtttcaatttctttgatttcttgttgcccaccctgaatagcttcttcaattaatttttgtaagtcttcgtcacctgcatggtttaagtgggtttgataaccagcaactaaacctttagctaccatcaagtaagaccatgtaccaaacacttcaccatagtgcataggttcatccgttggatttccacttaaaattcccattgtcatcctccctaattgtaaaatattcattaagcgaccttcctttcttgacgattggtcacctttttatagttcctaaattaaaccattatattcatcattttaatgatggttgttaaaggtaaaaattctaattttaatctatgtggactcttacgaataatggctaataaaactggagagattatgttataaaaagaggcggttgcataaagggaaattatcttctagcaacgaatatatatgataaaatgtagtggcatattatgaggctctcttcttctttttcccattgcctaaccaccttcgttcgcgatgatcagagatcgttattttttgtaacgattaccactattaaagaaacgagcgaaataaagaaaatgaaaaaacactttctcaatgaaggtgtttttttattgtgtttacaacaaaaataaactataatattgttatgttttatgttgtaaatgcaacaaaaggagtcgtgataaatgagagagattttgcgagagattggcgtcatcgctagggcgcttgattctataagtaatattgaatttaaagagtacgatttaacgaaggggcagtatttgtatcttgtgcgtatctgtgaagagcctggcatcattcaggaaaagctggcggaaatgatcaaggtggatcgaacaacagctgctcgtgctatcaaaaaattagaactgcatggttttattgagaagaaagatgatcgagtgaataaaaaaatcaaaaagctgtttcccactgataaaggggaagcggtatatccaatgatcaaacgagaaaatgattattcgaatcaagtagcgctggatggattttctgaagaggaagcagaacagatatatgagtatcttctaagggtgagaaaaaatatcgaaaaagattgggattatgtgaaaaaaggaaataagagacgctactaaatgataaggagtgatgacttcaatgaccgtcacttttattccatgtaatgaacagcatatagaagagctgcaaaaagtcggtatagacacatttatagaaacctttcagaatcaaaataaagcggaacatatcgatgcttacgtaaagacagcctttcatccgaaacagctgttaaaagaattacatcatccatcttcacagttctattttgttcaagtgaatggcgaagttgctggttatttgaaggtcaatatggatgatgcgcagtcagaagagatgggaagtgaagcgttagagattgaaagaatttatattaagcagtcctttcaaaaacaaggattaggccgatatttaatcaatcaagcctttgagatcgcgaagaaatatcataaacgtgatgtttggcttggggtgtgggagcacaacaaagcggccatcgcattttatcaaaagctagggtttgttcaaacaggagtgcatgcattccttatgggggacgaagagcaaatggatctcattatgaccaaaacactgagctgatctaaaagggggaagagaacatgcatgttccatcattttttcaaatgaaagatatggagaaaatcaaatcatttattcaatcaaattcatttgcaacagttgtgaccacaacggatgaaaaacccattgcgacacatattccagtgagttttcatcaagttgaagattcgtatgtgattacagggcatatggcgattggaaatccacagtggaaaacgtttgaagaaaatgagaatgtgctcgtcatctttcaagggccgcatgcctatatatcctcttcatggtatgaaaaagaagccgtaccgacatggaattatcaggcagtccatgtatatggaaaggctgtgctgttagaaaaaggggaactggtaaaagaattaaccacgatgctggaaacatacgaaagccacagagaacagcctgttttatgggatacattgtctgatgaactgttagagaaacaaatgaaagggattgtgggctttaaaatcattattgatgaagttcaggctgcttttaaattaagccaaaatcgccatgaaagggattatgctcacatcattgaaaagttggaagcagagggtgacctggaaatggctgaggcgatgaaaaagagagtaaaggatgtatgagaaaagcactctaatttagttcttctttttcttttatgaaatctgaatgagaacggttactcataaacaaaaccactctcttctaggaaagtggtttttagtggtgataaacgggttgcaaataaaaaggcccttatcattcaagggcataaatgaaacatttattttacttttactgtgaaagtcacgtctttactgttcatgaagtcatcagtcgtcacacttccaaattttagtttcaattctttgatgtttttaatgttgatctctttgcctttaggagctaagaattgaatgacgccatcttgtttcacgccaccttcaacatctcctccaatgttaccgtcagtcataaataaattcgcatctaactgcatacttccagctacagctttaccttgatctggatagaaatttaggactttatctgtcgtattttcgatgttgactcctacattgattctatccttcataattttaatttcgcctaggtttactttcattccttgagcattcgttttgtgtttacttgcatcaaatttctttgaatcatcatcttttttattttttgattgtgattttgtacttgttgactctttttccttagacgcacccgtagacacatcatctgttgagccgcaagcagtaagtgtgaatgttagccctaaagctagagataaagcataaaattttttcaaaatgaaaatccccttcagtcaatttatataagcatcttttaaaaggcttatacattatctatgactattataataggataaaagtatctgtaaatcaacataaaatgataaaaatagaaaatatttgttgtgtagagttggttagtctttgaatattttataaaccggttagcttaaaattacataaaatccacttctgatcacttaaaaccaacttgaatttccttataatagaattattataagggattgggagtgattgggatggatactatgttggttaatagggttaatagagaggatcatcatgaaagcttatttctgaatataccttcaaatgcaattggagctctttcaaaggaatctgctgagaggattttaaagagaaaggataccaatgaaattcatcaattgatgtatgttcctattgaaaattctgatgaccttaaatggttgattcatagtttgcataaaatcatcatggatgaaaaagatgtacaggtcgttcttgaattggcagatctactgtatttcttcgttgttcctttttataaagaagaattagtgagccaaggagagctgtcatgcttaatgaatgatatgttgtttattctggatctttggacaaatcaagaggttatagagttagttgaagtcattcaacttgaattaaaaagagtagagagaaaaggcttgtagagcgatctctacaagcttctctcgttattctgatgcagttgtgttattgacgataggctcttttctaaacacagccatgcatcctgcgatgatgattaatacagctggaaggataaagaacatagaaatagaaataatgccaccaacagcagatactaataataaaatcccaccaagctttgcttttttcttcacgatgacagatgcaacaatagcaagaatagagaataacatcgcagcccagcctaatcctgtaatttcactagtgccggaatcgctaaatgccgcatcgattcccccgaaagcaagagcgaacattgcgccgaaaaatccaaaaattcctccaattaagcctaaaacaaattccgtcgttcttttcatgatactttcctccgatatgtaattaagaattattggtacttaagaaccaacacaatcttactcatcggcattcttttcacgatgttaatagttttgtaaaaaaaaacaagaaaatccataaagaattttcttgtccatttactgggctctttcccacgtaatttttgtttcatttgtttttttctttccctttgccagtactttgccgttttcttgtttcacggtgatgtttaggtcgtaaaaggaatagagggcgccaaggctgtcattttctggtttgtgcagattgttttctttttcagttgatgctccaatggccagcgtctttgcaaagtttaaaccgatgacttcagcgtaatcactattggtatcagaggaagccgtcacgtttaaagaaatgacttttttcttttgatcaacggtgatggctgtgtcttttacgagcttagactgctccatgacttctttcgtttcattttgaatgcgttcattaatcgttggaagtgccttagattctgttttttgttctttcgtcgtattcgagcaagctgctagtatggagaggcttgcaactaggctcatgaaaacaagtagactttttctcacgttcgttctccttttttctgcgaagtatgtatgcttatgttaccacgaatccttgttttgattaaaagagaagtgttgataagctgtgaacaataaaaagcacccaaaatagggcgcttttttcttattgtgctgaaaggcttgtacttaatggaacagaagaaatgacggtgaatttaggagccgcagcaccagactctaaatttttacgtaaaagcgatgatttgattgttccatcccattttttatagacacttcctgaagtattcgcacgaagctgtacattcgagaaacttgcttgtgagtagctgtttgttccattatcttggacgccgtgaaccattttgacgacatcgaggtttttcagacgactagggttgaaaacaggctgcttatagcgcaatttcccattgacgtatagtgacactgtgccatcaccattgttgatgagctttaagttgacacgtgcaccatccgtaatgctcttatcgtactcactgttccagtattgactgccgccttgtgagccgctgccaagaaagaccttatagccagaagacgtttttgaaataccgctctctacaacggcagagccgagaccgaggtaccagtccgcatagccatttttaatagtggctgttttcggcagcacaatatcagcagagatacctgaccatttggcttcatccgtttgtgtcacaatcgcaccgtgacggggaccagctgctgaggcagggatacttgatagcatcaaaacgaaggccaaacttacactcaaaacgatgaaccactttttcataaaaattcctccttaaattggattcacttttattatataaaatgaaagagaggggctacttacattgttctggccgattttggtattttttgtgaacaaaatcggtcataaagtggtcaacttgtattcgaattgtaatgtgactgtaaaataactgggggcatcttcatgtataataagtgcagaaaccaaatacggaggattttttaatgaataaaaagcttatcgcgacaatcgtaacagtagctagtttatttttggcgtttagtttctcacatggagcaagtgcaaaaaaagtaagcggcaatattacttggtataatggtgtcggtaaaaagggcgcagatggaaaaaaactcggtcattgggatgcagcaactaaaatgggatttgacgtaccgaaaaaaggtacaaaacttagagtgacaacaaaagcgaaaccacataaagtgattacagtatataaatatgatgtaggcagaatgccaaacgctgtattagacgtcagtccaaaagcattcaaagcactagggtataaaacaagtaaaggtgtcgtaaaagggcattacacttattaatacataggcatgcagagaagcgggaaaagttcattttctggcttcttttcttgtagagagggtctgaaaggcaatgaaaaaatcaacatggtggatcatcacggtcatcggagtcgcagtgattgcggcagtcattttcttcatgatgaagccggggcaagaggcaaagcatgcaggaaaagtgaaaacaaatcaagatgcaaaagacgaattactcgtttcatttacagatcaacagttaaacaatacgtattacctgcatgacggggcgcttcatacggagaaactgacagcatatccttcgattgcttatgattctacgaaacagcttttatattacacgtatacggatgaagacacgcaaaaagtgagtattcgagaattgaatgtgaaaacagatgaagaaaaaacgctgtttacgagtgatgattccatcgacagtatgaggctgtctggggacgggaagcagttatatctcaggtataataaggattctggcgaacaattttatgtcgcttcttatgatttgaacacacaaaaaatgaaggtgttatatccagaaaaaagcaaggatgatacggtgagttcttttgcttatgatccggcgtcaaaccttctggcaatccagcattattccttaaaagaagattacaagaaaaccgatgaagcgaatgaaaagggaagagaccctgaaccaacgaccatgaagatcacccttcaaacaggtgcgaaggggaagcgtattacacgtatctcgcaaacgatcaatgatatttcattttcaccagatcataagacattgatttatacagaagtgaaggtgcgaaacgaaaaagaagtatcctctattaaaatgcttgatgtagaaacaggaaaacaggcgacactcgttaagaacagtaagaatgtgcatattttaagtgccgcacagccgcaattttctacggacggatcttctgtttatttcttaggtgttgctaaaaacgcaaaggaattaaaggatgacaccggacgaaaagcaaaggtaagaacgatatttgaatacaatatcaagaagaaaacagtggaagccgcttgggagaaggatggcggaattgttaacaatttcactgtcaatcgataaagggtacgttcagttatttgatataactggacgtttttttattttgccgcttgaaatgatggtgaaattgaggaattcatggaagggaaagcaatttttaagcaggaaacgtgtggtattttcgtattttgcttatgtgacagaggaaaagaaagagagtaatatgagtgtacataaaaaacgagaggacagatgacttctcgttttcactgatttatttggtgttattgtctaataaattttgaaagataaacagggcattaatggagtgagggaatccagcaacttttgtacagtgcttaataatctccatgatctctatgacagaaagtccgatatgtaatgcttgttcaaaatgagtctttaattcttcatcacattcgccttttgtaatgagggcagataatgtactgatggccttttgtttttcatctaaaatgaagtggttgaattctttttgttcaccgagttcaattgttagctgttcaatatttgaccaaatgctctcgttttcctgaattgaaagcttttctatgttacctgccgctgtttcttgtgtgacctggcaagtctctttttcttcattcaaattgaactcctccgttttttatcgcaattttccatttgttcgttcattgtggcttatgtgccttttgatagatgcaatgggtatatagtagtattatcggtttgctgcgtcaacattttaagtgttgaatgctcaaagaaaccattcatgcgatttattattccattttgaaagggctaatgaatggatgtccgttagccctttggtgtatcagaagttttatacaagtttctacgcatttacgggaagagtggtttcatttttattaaatgatatccatcggcctcatcatgtcataatcttcatgctctaaaatatgacaatgccacacatatcggccgctgtatggaacaaatcgagcaacgatccgaatgacttcacctgcatgcgcctgaatggtgtccttgtagccttgttcatgtaaaggaggcgcttcgtttggtcctgtatacacgatttctcctgtcgattgatagacttctgtatcaaatggccttctgtctaaaaccctaaattgaacaaggtgcaaatgaatagggtgtgtgcccctggttggattgacgatggaccaaacctctagactgccaagacgaggattttcggtgacagggtcattccaaaattgattatccaacaataggatagggcggccgtatttatcctgcgtgccgctaagtgtgagtgtacgctctctatcagcttgacttggccgaagcgttggcagcggtttgaaaatcggacgtaatgttttaggtactctcccttttagcggacgtgtgactttgaattgcataatgttcgcatctgtttcaggattcacatcctgtccgcagccggctgtatttttgagagtgatcgttttgttttcgtaagctgaaaagtcgatgatgacatcgaaacgttcagcaggtgcgatgctaaaggattgatggcgaacaggtcttggcaaaaagcccccatcggaaccaatttgcaagattgtggcgtcgttatctagatgcagctcgtaagttctagtattggacgcatttaagatacgaaagcggtattttcgcggctctacttctaaataaggccatacttttccattgactaaaatcgtttctccacaaaaaaagggcacgatggatgggtctggtaggtcactgtcttctggcgtgtcgtttggtctgctaggataaaacagtgagccatcctcctgaaacgtacggtccatgatcattaaaggaatgtcatagtcatctttcggcagctctaaggacttttcaaacgcatcagagatcaaataaaacccagctaagccggcgtacacatttaatcgtgtcaatgccatcgcatgatcgtgataccacaatgtgcaggcttgctgatgatttgggtatacgtatacctctcgttcaaagaaggggccggttgcttcaaagtctcgtgaaaaccaagcctctggatagccgtcactgcttgctggtgtgacgccgccatgcagatgaacgaccgttttgacttctggttcatcatgatggccggcatgaatggtgtgatcgaccggcaggaaatgcttcaacggcaatttgttcatccatttcactttgactttttcatttcgattcgcttgaatggttggaccaggcaaactgccattataggtccatagcttggttgggggcaggtctctatgaacttttagaaatacctcctccatagcgatttcataatacgtttgtcttgggttctttttgacgggctccgcgacttctggaattggcagctcgtcaacaaatttttctaggttcatgtcgtctaatcctcacttataatccaatttgatacagtataagtgcggacatgaaaataggtgaataaaataaaaaaacccgcttttcagcgggagcattacgggtgtttattttcaagcgctgcatttgcaggcacttttttattcggtttaaagacgaaataagcggcaagcacaccgaaggtaatgatacttgtcaaaatgagctgtggtctcattgattcgataaacagcatcgatgccaagatggcgcaaatgaccaaaatggtaaagtacgtgagatatgggaacagccacattttgattttgagctgctctggattttctttttcgattttacggcgcattcttaattgtgaaacagcaatgaccaagtagacaagaagggcaatggcgccggatgcattgactaagaacaaaaagatggtttcaggataaaagtagttcatcatgacggcaatgtaggaaaagaaggtgcctgcgactgtagccgctacaggaacaccacgtttgctgattttcataaagcgtttcggtgcttcgcctctttctgccaatgaataaagcattctggacgttgtgtacaacccagagtttaagcaagatagaacggctgttaaaacaatgacgttcatgacttgagcagctgatggaacgccgatgtattctaataccgcaacgaacgggcttgttaaaatactcgctgaattccatggaagcaaagtcacaacgacagcgatggatccgacgtagaacacgatgatacgccatacaacagagcgggtagctgttgtcacagacttgactgggtctgctgattctccggccgctattgccacaatctcggttcccatgaaggaaaagatgacgacgacaattccgagtaaaacagagctgaatccatttggaaggaaaccaccgttccccgttaaattggcaagacctgcagtatgatgaccgccaaaaccaaagataaatgcaaaaccgatgagtagaaagagaataatgctgacgacttttattaatgagaaccagtattcaaattcgccaaaagatttaacagaaaagatattcgttaatgttaagaggatagtgaggataagacttgtgagccaaacaggtgcatctccataccaatactgaataatggcagcaccggcaatggcttcgatggcgatgacgatcacccagaagaaccagtaaagccagccgattgtaaacccggcccatggaccgatggcatcactcgcatattgtgagaaggaaccgcttgtcggataggcgcatgccatttctccaagcattctcataataaagatcaccagaagtccggcaaaagaataggaaagaatggctccaggccctgcagaatgaatgacagcgccgctaccaacaaatagccctgcgccaataaccccagcaatggagatcattgaaatatgtcttgttttcagatttttttgaagaccgtttgtcatgttggacatgtctttacctccaaacatttctcttcatagagaaattgtttttagaatattttaaattttatcatactgaattgtcattcagcattggacaggttatcaaactgacatttcaaacctcttaacatgatgttaaaaagtataaaggatttgagagattatgttccctctttttcctctgttcattcttaaaaattgcataagataggatggggagaagttgtgtctcaaaataaaattattctgacaattttttagaaagagtgatattgcccatatgttcatcacagagtgaattggaaaaaggttgatgggagtaggtcttgaggtcaattgaccttataaaaataagtttacttaggtcaacacatttctatgtatcctattttgctgacacaagcgaatcatgttgctgtagacccacacgggctttgctttgtaagataaataatagaaaagtgatgtgtgaggaggcgcggttctacatggagcgctataacgaattaagacaaggtgaaacaggtgcttgggtcagcatcattgcctatgtgatcttatcagcggtgaaacttctaattgggtatgtgtttcattcagaggctctttcggcagatggattgaataatacgacggatattattgcatcccttgctgtgttgattgggctgcgtatttctcaaaagccgcctgatgaagatcatccatacggtcattttcgagcagagaatattgcgtctcttgtggcgtcctttattatgatgcttgttggacttcaggtgctgctgagtgcaggccggtcgctcttctcatctgagcatcaaacgcccgatatgatcgcagcttggacggcagcaggaagtgctgtggtgatgtacggcgtgtatatttacaaccgcaatctgtccaaacggatcaatagccaggctcttcatgcagcagcagctgataataaatcagatgcgtatgtgagtattggaacatttgtagggattatcgcctctcaatttcagctggcatggattgatacgcttgcagcgtttgtcattggcctcattatttgtaaaacggcgtgggagattttcagagatgcttctcattcgttaacggacggttttcatataaaagatatgtccaaatataaagagaccattgaagcaacacctggagtgggcgatttgaaagatattaaggcacggtatctcggaagtacggtccatgtggatgtagtagtggaggtcgagccgcacttgaacattgcagaaagccatgatattgcagatgagatcgaacgtagaatgaagaaggaacatgatattttacactctcatgttcatatggagccagcaggtgagacaaaagaagagaagaagtcttttccatcgtgagaaggcttcttttttctacatgctgatgttttatgcaaatgcgcgttgtatggtaaagttagactatatgaaatttaacggaaacgtgataggaggatcaggatggcatttgatgaaccaatgcattcagatttacaaaaaatcgtagataacatcaataaagtcatggttgggaaaaaagacattgcgatattaagccttgttgcgattttggcgaaggggcatgtgctgctagaggatgtgcctggtgttgggaagacgatgatggttcgtgctttggcaaaatcgattggctgtgagtttaagcggatccaattcactcctgaccttttgccttcagatgtaacaggtgtgtcgatttataataaaaagacaaatgaatttgaatttaggcaaggaccgattatggggcagattattttggctgatgagatcaaccggacctctcctaaaacacagtcggcattgctcgaagcgatggaggaaggcagtgtcacagtggacggagaaaccatgccgcttgcggatccttttttcgtcatggcgacgcagaatccagtggaatatgaagggacctatccgctcccagaagcgcaaatggaccggtttttattcaagctgcaaatggggtatccgaccatgctggaggagctggaggtgctcaatttgcaggaaaagcagtccccgattaatacgctccaagcagtgatgacaaaggatcatatccatgcgttgcagcaagctgttcagaccattcatgtggatgcatccattaaagaatatattgtggaaatcgctcaaacgacgcgtcaacatccatctgtttatttaggtgtgagtccaaggggatcaatcgccctcatgaaagcggctcaagcgtatgcactgttgaatcagcgagattatgtgattcctgatgatgtacagtatttggcgccatatacattgccgcatcgaatgattttgacatcagaagcgacgtatgaagggaagaaggcggagacactgctgcgacaaatgcttgagcaaattggcgtgccagttcaaaagtcgatgactcaatgaagtcacgtcatcgtttcgctgtttcattatggttacgggtaatgatgctcatcatcctcactgcggcagtcttttgttatgccatgtttcagggggggtttgtgagttggttccttttttatgcatttttaccatatactttgtatgctttgctgtttgcgctcattccgctgcgagcgacagccaaaaggacattacagcaaacccgcttgaaggcgggagacgtgctgtccgttgaccttgaaatcaagcggacaaatccatttccatacgtttacgtcttgattgaggatgatccgccggacacctttcatttacaggaacaaattgaaatgaagcaaatgctgtttccttggtttcggaaaacgtggcgtttttcctatcaattgaacgatgtcatgcgcggggaacatcatttgtcagcggttcgaatcaaaacgggtgatatgtttggttttgtggagaaagaagtgatcattccgttagaaaaaaagctgcttgtctatccgaaaatgctggatcttctggtggagtcagctgagtcagcgaatgaaaatggaggcaaagcggttcactcgtggttcaatgaaccgacccatgtgacaacaggcgtgcgggaataccagcaaggagaccgttttgcttgggtggactggaagacgacggctagaagggatcagctgatgacgaaggaatttgaacagaatcaaacaaaggatcttgtcgtgtttgctgattttacagatgaagcggtttttgagaccgtcgtgtctattacagcttctgttctccaaacggcagtgaaaaaaggggtgccttcaggttttgtacctctaggagatcagcatgcctttcgagtggatcaaggagaacttcatttacaggacatgctctattatttaacaagggtgcagcatcaaccttctcgcgcacaagaatataaggcgttagcagcgagtgagtaccagcactctggaaaatatgtcgtcacgggtcagctgcaagaagagcttgctgcgagcctgcttggaaatcgaaacagaaagaacatcactgttcttttagtgaagagagccttggatcgattcacgacaaaagaaaaacagcttgtagaccggctcaaggcatctggaatacgcacgacccttttatttgaagaccggctgcacgaaagaactgtgaggtgacaaacatttatgctgcatacgcatcagcggcaaagccgttttgagttgttcatctattatgctgtagcatttctgctgctttgggagtggcttcgtccgcttcaagattttacagagacgagtcatacgtcttatttcatcatttttatagggcttacgtgtttgtttacattctttcgtttgaagtggtatgtgacgtttcctatttgtactggcatgatcttgctcgccttatatttgatcttttatcaagcagagccaagctattcggctgcattatttgctgatatcaaagataatatcaccttcatgagcacaggcatgtggagtgacatgtacccctccttccgcacattattgttttatattttgctgtggctgcttgtctacttgcttcattattgggtggtctatcagcagcgtatctttttctttttactcatgacgattgtgtatgtcacgattctggatacgtttacgccatatgatgctgcctttgcgatcgttcgcattatggtgtttggtttttgtttgcttgggttgctgtatttcgatcgactgcgttcggctgaaggcatccgggtgtcacagaaggcgcgtctaaaatggtttttgcccatgctggcgctcgttcttctatcagcggcactcggcgcttctttgccaaagtctgatccgaaatggcctgatcctgtcccgttttttaaggcggtgacgaatcaagataacgcagccgggcagaataaggtgggatatagtgcagatgattcggcgcttggcggaccgtttagtgaggaccgcacaccggtctttaaatggagcggaaaggagccgtcttactttcgtgtcgaaacaaaaagcatctacacaggaaagggctgggaggatgcctcaaatgatacaaagcctactcggctaaaggacgatgatgtgccaaatcgttggtttaccgagcgtgtaaaaacagaggtgcacgaaacgagagtcgatatggaatctgactatcgatttaatcatgccgtctatccaattgggacgatcacactgatgccaatggaaaatattccgctgcaaatgatggggaaaacggaaaaaattgtcccatccagtcaaaatccgccgaaaaatttagggaactaccaagtcaccttcttatctcctacatttatccttgaggatttgcagaggattaaagtgccaacaaagaagcaggtaaatcaggaggttggccgtgaatacttgcagcttccttcctcattgccagagcgtgtgaagacgctggcaaacagcttaacggaaacgaaggataatatgtatgataaagccaaagcgatcgaggattatttaggatctgcgaagttttcatatgaaacgcaaaatgtcgctgtgcctggtcgtaatgaagattatgtagaccaatttttatttgatacgatgatcggctactgtgataacttttcatcctctatgattgtaatgcttcgttcgatcgggattccggcgagatgggtgaaagggtatacgtcaggtcagttatatgaaacacagatggatggaaacaatgtgtatgaagtgaccaataacaatgcgcattcatgggtagaggtttattttccaaacagaggctgggtcaccttcgaaccgacaaaaggatttacgaacccagagacatttacgaatgaagccgtttcaagcgatcaaacggatgatcaaaaggaagaagatcagcctagctctgatgcacgcgaagatcagccggcagaacagccgcagcagcaggagacagagcagccggcagaaccaaagaaacaaacagcacaagcaaagccaagtatggtgcatgttggttcaatcttgggatttgcggcaggagctatggtccttctagggttgatgagctggttgctttatcgattcagagcaagatggctgccattctttattgtgagaaaggtgaaacgtctgccagaggaggaagcattcttctatgcgtatgctgctctattaaagcagctgaagcgcaggggaattgagaaaaaacctggcatgacgctaagagaattcgcttcattgatcgatgacaagcatggagatcatcgcatgtcagagctgacgcagctctatgagcgggcactctatcgacgagaggatgcgtcggtgctttggcggcaatcggcaaagttatgggaaaatttaataaacaggagatagtcttgaccccgtaccttcctgttgttagaataggtgaatattaaaaccttctaaaatacatgaaattgaagcgttcggatgtgagtctgggcgcttcaaaagcgtgattcacactgagagcaggttttctcctctcattttttctgtgcgtttataaaaaactatattggacatagaggtgacaccatgacaaatttagtaaatgaaatgattttggttctagatttcggcagtcagtacaatcagctgatcacacgccgtattcgtgaatttggtgtgtacagtgagcttcatccgcacactttaactgctgaagaaattaaagaaatggcgcctaaaggaatcatcctttctggcggaccaaacagtgtttatgatgaaggatctttccgctgtgatgaaaagatttttgatctagacattccggttctaggcatttgctacggcatgcagctcatgactcactatttaggcgggaaagtagaagcggcaagccagcgtgaatatggaaaagcagatatccacattaatggaacgcctgctttattcaaagatcttccgactgatcaagtcgtttggatgagccatggtgacctcgttgttgaagtaccagaaggctttacagttgatgcaacaagtgcacattgtccaaactcagcgatgagcttagctgagaagaatttctatggtgttcagttccacccagaggttcgtcactctgagtacggaaatgacctattgaaaaactttgtctttggcgtgtgtgactgcgatggcaaatggtcaatggagaacttcattgaaatcgaaatgcagaaaatccgtgaaacagtaggcgacaaacaagtattgtgcgcattaagcggcggtgtggattcatctgttgtggcggtattgatccacaaagccatcggcgatcagctgacatgtattttcgttgaccacggtcttcttcgcaaaggcgaagcagaaggggttatgaagacatttagcgaaggtttcaacatgaacgtgattaaagtagatgcgaaagatcgtttcttaaataagctaaaaggtgtatctgatcctgagcaaaaacgtaaaatcatcggtaacgaattcatctatgtattcgatgatgaatcggacaagctaaaaggaatcgactacttagcacaaggaacgctttacacagatatcattgagagcggaacagcaacggcacaaacaatcaaatctcaccacaacgtaggcggtcttccagaagacatgcagttcgaattgattgagcctttgaatacactattcaaggatgaagtccgtgccctaggttcagagctgggcattcctgacgacatcgtctggagacagccattcccaggtccaggactaggtatccgtgtactaggtgaaatttctgaagaaaaactagaaatcgtccgtgaatcggatgcgattctacgcgaagaaattgccaacttcggtcttgagcgcgatatctggcaatacttcacggttctcccagacatccgcagcgtaggtgtcatgggtgacgcaagaacatacgactatacaattggcatccgtgctgttacttcgattgatggtatgacgagtgactgggcaagaatcccttgggatgtacttgaaaagatctcaactcgtatcgtgaatgaagtgaagcatattaaccgtgtggtgtatgatattacgagtaagccgcctgctacgattgagtgggagtaaagacataacgttatttgaagtgatacacaattatattaacgttttaacgtctgtaatttgactgaaaacaattaaatatcaacatattcaccaccaaaaaacccaccattatgaaaaatactggtgggtttttaaatttccttgcttctagaatttttaaccatacttttgtttatatttgctataatctaattataagaaatttcacagttaaaagtcttgtcataagatatcagttttaagattagctattagaaaaggaggggattttttgaattacttcaaaattctatttcagccaaatgataagaaaaaaccttttcataagcaggtatttttggataatgttatagtgggtgaaaatggatattcttgtggggttcagtattctccaaaatcttttaatgactggttaatgaatgataatatatacaaagtttttttggatagcacagtaaaacaacttatgatgagtaatcaaagatttttagatcttatagaagagcaaggaaggctcaatttaaatcttgtcgactgtaaacttaaaaatattgatattgatgatgtattagatggagaagagcttgattcagaaatactaagatcagttatagattcctatgaatatcaagtcatgcaagtttactttcggacaaaaaatcgtcacatggttactttaaaagctaatggtgtactaggaatagacaatgatttatcggaaaatgaaatgaaagatgttaaaaaactaatagatttccttggttttggtccggtgatgcttgtatgaaagagaaaatttttgaaacattaaaaacgtttataattacactgattgttgcatttatagttactaatccagagaactttgtatttaatattttgaataaattaggttatgaaaaaaatgaaatattaaaaaaaagcattttaagtgctgttattacagcaattataacaattgtattaattttcatttcaaaattttggtcgaatataaaaaagaatttaacaaaagtggatgtatcaataataacaaaaataaatggaacaaaaagaactacttgtaagttttcttcaaataattatgaatatgctgatcaagatattgaaatagaaattgttcttaatccaggaggaaagttatctaatttcttattaaaaagaataggtttaaaacttaatgtgtattttaatcctgaaatattagatgtatctttttatgataaatgggattcagatatagggggaccatttagactttccgaaagaaaaataacaattgatttactcggagatattgaaattaaaggaaaaaattttttggaaagcagtcataaattaaatgaaaaatttaaagtgaaacctattagagtcaagaataataggactgctttagattttgagataacatcagaaaaattgggttatattacaagagcgatctcaagatttttattaactattgactgtgatccattgaaagtaacttgtaaggaggagtagaattgtcaatttcaaaagtaacttgtaaatttttcaggctaacagatggtaatataaccagtttgaaagatgtacaggatagaatattaaataaaatttatacagaaaagcttaatatagctaaaaaagatattaagctagcagaaactttaactgaaaatgaaaaaagtttttattatacgtgggaagaaatttctgaactaaataaaattgaattaaataaagcatgtgaagaatctgatgaggcaatttgtgaatttttatttgctacagcaaatattgaatacacaaagaaaaaaaagaaaggtaccgatggaaaatttcttcctaagaaagaaagagttaactatacccaagctaagacatattttttctgtatgaatgaagctatttatacaattatttgttcgtctaatgagacttgtatcgaaagggtgaaaaaacttattggaatcaattacatagatgaaaagaatgaagcttattctattcaacctgatttatttaattggctattttttaagtatactcagaataaaggctctttaactaatgaacttattctgatgaatataaatggttttattggtaatatcggtgatgaacacaacatttttgaaggaacttcagatcaaacttctgaacttataataactaaagcttttataagtaatggggaaacgctaaaaacaatcactgctaggttaaaaaatgaagatatagatataatttttgcagttgatgaacgttctaatactcagatatatacacgccaatcagaagtattaagactattggaatttcaagatgacgaaactttctttgttatttatttatacagtaaattaatacctgaattaaaaacattatataacagtgcttcctcacagtttctttcagaagaaaagagacagttttctgaaaaaataggtttagaggtaatagagtcaataatcaaacaaaactccttgaccttaaaagatatttcattgttatttgaaaactcgatacaaatgcaacaagttgataacatttcttaaaaagtttgtttttatatccttttttaggataaaattattttactaatctaaagttttttgtaatatgaaaacacaggattaaaaattaaacttttgaccaataattgaatgttacttttcgatttgaaatgaaaaataagattacatgttgttagggagggtagttatgtgagattagcagtacgtttatcgcttgataccatgaggtggatcaatgaattagagaaaatttataatgctgaatttggtggtttaaatctcggtcaaggacatgtagtaagcaaagcttatcatttattgagtgagtctaatgaaaatttagaggatgtaaattgggtcaaagtacaaaaagcaataataaagaaatccgaaataacgatagaagattttgataatcacaatacaaatggtaacgtaacttcattgaatttaagcaatgaaacaatagacggtataaaaaaaatgcaaaaatttttacctagccaactaggtggtaaacgagttaacgttgggtattgtatacagcttattgtaaaagtagagttgctcaaaaatatagatactaaaattttatgattttgaagctagtaaaatcagtttaaaagctgaatttgctagctttttaattttttaaattaaagatagaggattaggttgatttgtgtcgctaaatcaactacaattaacgtagcttaaatagctacaaaaaagcatacttgtacccttttaatggaagagaggagaggaatgaaataatttaatagatggaaagttacttagacgatattgcagtgtcgattggagattagaaggaaaagatgaagaaattgtagtagaagactattttgataagaaagaaggaatgaaaatgtttcaaggattaacaaagcaagatttaaagcaattgcataaaatatggagaaaaattaagggtgatattacagtaccacaccaaatactggtggttaaaggaaaaagagaattggaggaaatcttccaagcgtcagttcactttaaatacactagagagatattgcaagctttagatcatgcaaagagcaactatcatgaattcacagggatttcaatgttagacgatattatttcacataaaagaattttctttaataattatcgttaatcgttgctctttatgtttgttcgatttggaggagagaatgataaataaaaaaagagtagtaaaccaatttttttttgaatccatggttattcttttaccgttaagtattgtttacatactagtaggtacgtggctctctagtattacggattttggtagaacatatgtgttttcatctgatgtaacaaatcttcgtgaagtttatgggacagaagtaaagcatggctggatagagtttgatacctttggtcaaggttttaaaaattacagttttgatgtttcccatgttttttggggcggattaatatctgcaattcttctagttttaattggcaagctaattcatttgggccttgtaaaattattagggaatcgagtaaatattaaaaatagaacttgaaagggcgttagtgagctgtgaagctagaggcactaaagaatatccttagtcgaaggcagagtgaatggcatcatgttgttttcccgcgcaggaaaatgaatttattaaaatatctccttggagtgttcatttttgtgctgacagctttctgtggaatagtgtctaaaagggtggtgcggggtattcacaatcttatgcaagtcttgtatttggaacgtttcgtaaaagtttagataaagctgttgaaatgcaatacctagaaatgaacatatctaagaaggttagagctattcctaaaggtaaggcgattgtgtcgtattggacaaaagaggactttgaaaaagtgataaaccaaatctatatagaagatttttatgagcatctgaattttgtaatgctgtgggtttactatatgactggaataagagtgaatgaaggcactgctttatgttggaatgatgtcgatttgaaaaataaacgtttgcgtgtccatcatatgttaatcatgaaaacgcgaagtgaatggagaagaaattcttatacaaaaacggaagatggaaagagaattatcgctcttgatgatgatacaataaatatattaacaatatggcgaaatagacaattggagataggattaggtaattcaaatgactttatttttagttatgatggattgccaatgattaaatcgacaataggcagaatcattagacgttattctcaattcgcaggagtaacaaggattcaagcaaaaggattgcgtcactcccatgcttcgtatctaatcaatgaatttaacgtttctgttcttgtgttatcacaacgtatggggcattcaagtccagagattactttaaaacactatgcccatatgtggagtggggcagatattgcactagctgagataatggcaggaaatattttaattgaaactgctttacaaacaagaattaatttcaatggaaaccaatcattaaaaaaatgaattagagaggaaaattccatgttagatttaataaaggatattgaaaatgctcttcgtaataaaagctacttatcagcgcttgcactatctctaactttacctgatatttgtgggaaaattgaatatcctcaattcaaaaataaaaatggatacagaaatgttggagaacagtataaaacgtggtttgataattgggtaaaccattattacgctgacaatacatggtggacggatgattatagtaaggcgaaaaatccttattttacaggggaaatgtgttattccttacgttgctcttttttacatgctggaaattcagctataaaagagtggggagagaaggaagacgatgaacatcgttattattacgaatttaagctggggataggtggggcagattcgtttggttcttcttggtcaagttcagtttgtaataatggaaaaatcataaagacaaaaagtgtgaccataaatattgagaaattgtgtgagtacatttgtttagctgctaaaacatattacaaagaaaaagatgctagtcattttaaaaaacataatattgatttaattgattttaataggtatcttcaacaatgataatcttttttttataaggtttgcaatttgctttcccaccgaaattaccaccaaatcaaattagacagttaagaaaccttgttactaaaggaatttctgctactatgtatgattgagtgggagtagttgtattagagctagaaacctttgtgtatcaagggtttttagctctttttcatttgtttctgcttttctaaatagtccacagtaaattgatttttaggggaggcatcatagtcttgctttgtctccttaaaggagatgatcccatttcatttgttatctacttcaaaataaagagctactgcttatggaagcttagctaatggtatcaaagaagcgaaaactataaaaaaaagaataaactttattaaaaaaaagagctgataagatgagatatatcaaactcaaattattggctctgcgtatttgcgtctagctcttggattatagttatgcttattattaaatctgtgaattccactatatttttcttccgttttaagtgttaattaatcattccatctcttacacacatcaatccattgtgaataaccggagtatttttctaattgttttattgttagttcaatagcactgttactgctcccgcaggctggatagactgtctcaaaacgttttagtgaaatatctaaataaacagaaacgccattctttatagcaaaaggacatactccgccaatttcatgaccgaccaagttaacgacctcatgaggagaaagcattttagcttttgttttaaaatgttccttgaattttttgttatcaacttttgtatcgccagaggtcacaactaaaatagcttgcccatttactagaagggagagtgtttttgcgattctttcaggttcgcagcccaatgcagaagcagccaagtctacggttgcactagatactgaaaattcttgaattcgagtatccatatcatattgtttaaaataatcttttacttttttgattgacatgatgatttctcctttttattagtattgatttgacattttctcgattttaaaatggtccttttaagataagcgtcattcattctgctcattctaaagcaatcttttctttttcaaagtaacaagtacagtctctccaagtgctaatacaatagagtcatgattatcattatctattatttaaacgatattgatgtggtgttaggtgatactttcccttaaataaacgaatgaaatgctctacattctgataaccaacggctgccgcaatatcatctatttgtaaatggctaccagtgatcatttcgcaggctttgtccaatcttatttcttgtcgaatctcactaaatgatttgccaagcttacgagctatatatttagacagataagattgtgaaaggttaaattcctctgccatctcctgaattgttatatgctcacaacattgctgaatatattggagcatttgaatcatacgtatatcactatattgtttgacctgatttacgtttatatgacttggtttgaatcttaataagagacataataatatctcaaacaaattattcataatcaactggtatccaggaaaccgattataattttctgtaaatagttgaagagagcagtctagcaaatttttatccaagcgactatggaaaataagaatatttttattttcttttatatacaatgcattcaaaaagaactctgaaatgacattatttccttttaacattttaaaaaacactttttgaaaagtacttttacggatcatgatttgtattgcgattgtattctccattacaattggcttgtgtattgtgtcaggtggaataaaggcaatatctcctgattgtaaagccatttttttatcttccacttctacatacatctcattttccagaacatagatcatctcaaagaaatcatggatagccgacaattgaggcataaaacggctatactttctcacttcgatatcattctcctgacctaaccacatggtatcctctttttcaaattcgttctgccctttaagcaaaaattcttctatatatatttgcttatgcatgaaattgtttttatcataatccttcaaaaataattgcaacgattgattgtcatgctttttctgttggtattgttgataaaagatttcttgctcgttatattctcttaaatattgcatcgcttcatgtttttcaagtttatctttttccatctacatccaaacctctagtctatttactgcaaccaccagggccttcactgttgcttctataatatctttatcaattccagcaccccaatgcatttttccttgatatgaaattccaatctgtgcacaggcttttgcttgagaatccttgcccaaagaattctgttcatagacttccaaaacatactcgagatgaaaatatgcttttaatgcattactgattgcatctaaacttccagtgccagttccttgtatttcaatttgttgatcatctctcagcaaagttaaggtaacttcctgcttctctcctttatgaaattgataatcaagcagctggaaatgagggtgataatcaacatactgttctttaaaaacatgatatatttcttcgacacacaattccttacttgcctgatcagatactttcttcgcttcatatcccatggcttcattcatttgataaggaagttgaatgccataatttgtttcgagtatatagcctatgccgccttttccagactggctattgattcgaatcacatccgtttgataattcctccccaagtcaactggatctactgggatatacggaacgtcccatttatcaacatgattttcctttctatatttcatacctttagatatcgcatcttgatgtgaaccagagaatgcggtgaaaaccatctccccagaatagggctgccgctcatgaacagtgatttttgttagtttttcatattttttacgaatcgcttctaggttattgaaattcaattttggatcataaccttgtgaatacatattcatcgccaaggtaattaagtctacattccctgtacgttcaccgataccaaataatgtaccttcgactctttctgcgccagctagaacaccaaattctgcatcactcaccccagagccacggtcattatgaggatgaacagataatgtcacactgtctcggtaagacagatttttgtgtatatactcaatctgacttgcaaagatatgaggcattgaatattcaactgttgtcggaatattgatgatcgctttatgagttggtgtcggtttccaaatatctaaaacactattacaaatatctaacgcataatcaacttctgttcctggaaagctttctggactatattgaaaataaatatcactatttgttttttcggcaagttcttttactaaaatagctccatcaatggcaatttgtttaatttcatcttttgttttcttaaatacctgtctgcgctgcgcttctgaagtcgaattatataaatgaacaatcgctttcggtactcccttaatggcttcgaaggttcggcggataatatgctctctcgcttgtgtgatcaccataatcgtgacatcgtctggaatcatatgatgatcaatcagtgtccgtaatagcctaaactccgtatcagaagcagctggaaatgcgatctcaatttctttaaaacctatctctactaataactgaaacatttccaatttttcttctaagttcataggaataggtaatgcttgatttccatcccgcaaatccacactgcaccatatcggagcactttctaatgtttctttcttcacccaatcatacgtaaggttcggtggcaaaaagtatttcttttcgtattttttgtggttaaacatcatcgattcctcctagaaaatagaatataaaaaaagcctttcatccccaatatttaccttggagacgaaagacttcttcttacgcggtaccacccctgtttcatgataaacaaacattatcatgcccttattcggatacagattgtttgatcttatatccttcccatataacggtggggtgccgaccttaactacatcaatacttttcatttcactaaggctactctaaggtgagttccctgcttttttgttattgcttctcatcaaccagcaactttctgaaaacatttcggcaagtactattccttatcatcgcattctaatttttctgattttttctattataccaagtctacaaaaaagagatagtgatagggatatcttttttaattgattttttttgttctatgggtgcttatctttaatcctcttcaccaaataaaattccaaggccacaaataaaggtgagtgaattcatagcgaacaataaaatcgcaccaatttttttcatggcaatgaacctcctcttaaattcattctgctagccttcaaaatttaaattcactggttcatcctctaaatgatccacagtattttgttctgtcactggcacactttcatctacagttttaaaactaagttcgtccatccatatgtgaccttgaccatgaagcaatatgccaaacgcaatgacttcacttttgactggaacatccaatactacactaaaatgattccagccgtttgttcctgtaatggggcggttcatcatgttgtcaaatgctagaacttcacctgaagaatggtcaatcctcatccataaaccagctgaacctttcacatcttcgcttttgacaaaagcggaaaattgaagacgttctcctttgtaacgctcagatttaatttgctgcatcaaggtcgcaaatcctcgtgctttttcatcctttgatttcaggtaagcagaggtagtaccactgtgtacaattctgtcatccaaacctgtttcatagtcagatggtgtttcacccgtcataatccagccggtaggtgtgttcttatttgcagccatattcatttcctccttatcaatgacattccttagtaatctccgataacgtgcgggtgacatgtcatatatcttcttaaaggctctagtgaaggattcctgtgaaccaaaacgatactgcaatgcgatatcaatcgccctctgatccgtatgaattaaatccttcgccgcttgagtcattcgacgttcccttatataatcgacaactgacttcttaatcacttttttgaatatacggtgaaagtgaaacctagaataaccagcgtgtttcgctagagtttgaagcggtaaatcatctttcagatgctgttcaatataatgtaatgtttcttgaatcattttttcatgttcttgataggacaaccgaccacctccttgccttacgagtttagtatagcggaaatcatcttttagaaacttgactttttgtgctatgttgcaatttcaaagaatagagggacaagcattttaagaaatatataaggaaactttctgtttgagaaatttaatgattatttgtaaaaggctattaaaaaataaacaattagcacaattgatcaaaaaaaagatgagggaagtaataaaataaaagatagaggggggagaaacaatggattactacgagagaatacaacattcgattgagtttattgagaagaatctccaaaacaatataagtataaaggatatttcctcgaaatcctgcttttcagcgtttcattttcagcgtttgtttcaagccattacaggttattctgtgcaagagtatattagaaatagaaggctcactgaagctgctagattattgaaagaaacaaagcagaacattttacacatagcgatttctttccagtatggttctcaagaagcatttactcgcgcctttgtacaattctttggggtgacaccgggtaggtttcgaaaagaggaaatggtgttaaagcaacaaagcaaaatggattttttatcgtaccaatataagctagacagtgaactcaatatgaataaacctgttatgactcaattaggcaagttttatatcattggttacgaatatcaaacaaatcttcagaatgaggaatatttcacggacattcctttgttttatatggattttggaaaaaagaagtattatcaacagattccaaagaaaatagcacctcatatggcttatggtgtatctactcattttcaagatgatggccgtttttcgtttgttgtaggggaagaagtggaggaatccgacgatatagaattaaatgagggatttgtaaaaatagtgattcctgaggggaaatatgcagaatttaaagtgagtggatcgcatgaaatggtgcaaaatactagaagatatatttatggtagctggcttccaaattctaattatgaaagaacgagtggaccagattttgaaataacagatgtcttacattcgaatggcccaaacgatataaaaatgagaatctatattcctattgaggaataaacaaaggggatcaagagatgaaaatagaaagtctttttggaacttttcctgtattagcgtcaaagaatctattgttaaaaaaggtggatgaacaccatttaccagagttattttcaatttacgacaatgacacagtctttcagtattgtgggatcattcccaaacataacctccaaacggtaaagaagatgatcgctcattttgaacgagattatactaagaaaagcagagtgaagtggggaatctttcaaaagggcaagcctcatacgctggtcggcatcatcgaaacaatggacctcaatcaaaaagtgaatgcggtgacgattggctatttcttggcagaagaacattggggcaagggcatcgcaacagaagctgtctctacacttgtgacatttctgtttgaagagattgatatcaatagaattcaagcggaggtcatgccggcaaatgaggtatcaaaaaaagtccttttgaaaaatggttttatcaaagaaggactgcttagacaagctgttttatggtctggcaaaggaattgttgatttagaaatatacagcatgttgaaagaggattacatgcatgatgaataagaagcttgataacatgatgctgatatggcgtttaggatatcagcatttagttatgatcttatttttatgtatttgggaactccttttagaaaataaaaaagcgaagcctgtgctcgctcattatggtttatatcatttcgttggaaaatcgaatttgtctatcttatagttcatcataaaatgtgaagtgttgtaacttcaattcttcacagacttttttgatgatccatttgcctcgttcttcaatcctgagattgactttatgtagatactcacttaattcttgttcattttgaggttttaattgattgtaatttcctatgctatcaaaatgtccttcccaaaatttactcactgtccattcttcatcattattcacataaggttgaaggaaacaggatgcctcgaaaaataccttcttcaaaaatacctacaaacaccatgaagaaacaaagtgcagtaaaggaaggtaaggatagatcctaatgcttgaatataaaaacgtgaaatcatcactttgaattgaatgattaaaggtgaggagaaagccgtcgtatcaaagatttgaacagtttgtgtgtggatagggtactattcatccgcaaatgagactctcttttattcacattatttgtgaaaaaggagagtcttttttatgactgaaattacagacttactagatgattttaaaatgaaaaagatcaacatcattaggataagccgcgagtcaagatcgtggcttacctttttgtgttttcccatgttcggagcaggtgcagtgcatttaagtacattcacctaacatagtgcataggataatttgataaactgtgaagggattgagaaaaatgtattactatccaaatatgtatccatatcattatccttattatgttaatgtaccaatgaataactatggtagacactctgtttattggaatatgcccattgagggacatgcaaacagttcttttcgtttttccaatagtgatgctgcaagcattttatcaaaagattatggagcagaaccgtttgccgttaatatcaatgaggctacaaagaaaaacaatacgtatcgtaccgctttatggacaggaactcatttgcaagttaccttaatgagtctcaatgctggcgaagatatcggtttggaaatgcaccctaacgttgaccaattcttacgtgttgaacaaggtcaggggattgttcaaatgggcaaaaagaaagataaattaaattttagaagaaatatttatgatgatactgcaatactgatacctgctggaacatggcacaacgtaaccaatacaggtagtattccgcttaaactttattcaatatatgctcctcctaaccacccgtttggtactattcatgtaacaaaggcagatgcagtggctgcggaagaaggtgacggtcacggcaacaaaaatacagttatttttggcagaactccagatgaatggataaagcacacggaatttttagtaaatgaagggttagaggatgttaaaagaggaataaatgctacacacattcttcaagaatttattctaatgggcgttcttgtagggaaagggtattctcccgaaaatgcttatgaaacagtagaagaatgggaacggacaggagaatctaaacttcttcagctaagtaaaaatatgtagaattagagtaaatgcatatagtgaggagaaaaaaccttttgataaaagatttacttaacctttaggttccactagttaacaatacaaaaggagtatgattccattaataatcatactcctttttctgtatttaaaactaatgaaaaaaggattatattggaaaagtgattcatgtaaattgacatcattacaccttcatctaaaaggctcctgcgagacctctttcaaatgctgcaagatgattcaaagaggcgttacgaagttgtgaaaaaactgttctcatatcgttagggatatcaagtgataaaaatctttcatacatagaaatattgtctatttccccctgaacaccagcagcatatgctgccttaatgttttctggagtcgaaacgaatgattgtgatatatctagaggtaaaggaacttgataacgttcaaataggggtaacaacgcatttatatgtctcatttcggcttcttttatttgtgcaaatgtacgaatatatccaaaatttcctagaatattgtcatatcttgcttgtgccaagtattcgtcttgaagggcataagtcagcatttgagggacggacaatgtgggagcacttaacgctcctttagcaccgtaattttcaacttgccgattagtgtgtgttacctttgaatgttgaaaaaaaaacaaaaaccatacagcgtgattttgttcatctgctgctgcacgccgaaatctatctttaatagtaacatcctgtgccttatctgctatatctaaataaaaatcaaccgcttcttgttcatctttaaaggcaaattcgattcctactctatacttatctggacattcctcactgattttaaaagttggctgcctacctgttagatttctataaattctgctgaactcttcaagatgacgcctttcatctttttgtatctcaagtattttgtttctttcatcctgtgtaggtgcttgtttggctaacttttcataacaagcaacagcactatactctgcattaattgctttctgaatatcatttacaagttgagtgtcatttgttgtacgattatagttattatcataaagaccataatgattgaaattttgatttgaatacatgattgtcctccttctgtttaattgtcaacgtatcttatgtcttatacataggtaggtgtgcaaggtcaattatcggagaaatagtaagttagagaaattggaggtttcttaccccttatgttttggattgaatctggagcatattatgaagtctactgtgaagttccgtgttaatttgtaggtagatacagaaaccaggatcatccacacaagcattctttaaatttccgatactttaaataaaaatatctcgatcattcagccaagctactcttcatcaaaatacgtatcccacttacagtcctcaattttataaaattcattcactgtctattcttcatcgttgttcacataaggttgaaggtaatatatttagacgaatttttttcaacagcctaatggttgaaagagttcaaatagtgaatgcataaataaataacggcccgaattcatccaatgtgataatacagtgaaattcccaatgcagtgggtggcagtagcgaatttttcaaacttatggttgatatggatatcagaagttagttttttagaatgattgaaagtcgtaatgaacgtattcattgtttctccacggagcaagttgtaacgatctaaataaagctgtgttttggctttggttcataatcagtactccaaagtaattgataaatataaaaagaaggttctttatcacagtcagctttgcgaccagctttttttgtgacattacagattccaatttctttgagtttgcgacttttataatctaatattaactcaatagatgatttatcttttggtatcggttctttgatataactttgtttaaaatcccattcgcaaggcttgatttcaagttcttcacacttttgaaaccattctgttatccaagtgtgctccttcatatctttcctcctgttctactcatttttcagtatgaagcattcgatttttaattcttctccacaacatcagcgcaagaaccagcaaaatgacacattgaaccgaaagtaaaagcatttgcattgccataggcatttgcccatttgtcatttgatccacgatattatgcaccgcgtgccagatgatgacccattgcaggctgtgagtaagcgccacgatttcagccgcaacgaatccaaataaaaaggcgaatatgatttgtgccactgttaaggtgaggctttttccacttaaaagattagcagcatgaccaagactgaatagtacggcggagccccatatggcagtgcttagattgattcgttttaaatattggaacagaatgccgcgaaaaataccttcttcaaaaataccgacacagaccatgaagaagcaaagcgccgtaaaggaagaaagggataaatacgtgtttaatccagcaataaacgggatggcctcaatgaaaaggatgggaatgacccacataccaagagacccttttcgaaaacctatttctttcaagtgaaaacggcttttttgaataatgaatagaagtaaaagacacccagccagcatcgcactgccattgatgatatagatggtcattggatcggtcacttctttgatggatatataaacacctgcacttgttggaatgattaaagaaaacagcagtagaagcacagcttttcgaatgattgtgattggtttcatgttttgattcctcctctaatctcagagtagtggaatcaagcagaagcctcaatcaaatgttcctaacatgtcaatttttagccctaagatgcatattaagatgttgttcgtttttttcgctgctgtaaaagctcattgatttccgcagcggttgctttgtcttttttatacaagaggtacttgatcaaaaagaataatgccataaccacaaggaaattcacgatgaacgaaaggagactgatttccccgctgacgataatgatagttgtcataattatacacatcacaaggacaacatacaggatttgttgaaaaagaatccggtgatggctatatgtttgttttgggtatagcaggaaagtcagtgcgcttgaaaaaaaggaatttaaaatgatcgcttgtaaaatgtaaatcggcattgatccaaacgtgaaacagtaaatcaacactaacgccgtaaagatgatacaaaatgtgatgaaaagattgctgatgtaacgttccatactattcacttcctccgtaatccaagcttctcttttaatgctttaatataaaaacgagaaatcattactttttcttcatttgtaaggattgcctcgaaacggccactcgttttaggagaaatggtgacaattgaatcaatattcagaatcatcgatttcgagatccttacataatcatatgcttcaagccgttcttcaagttcaaacaacttttcttttatgagaaacaccccatctgtcgtatataaaaacgatcttttatcaacactttctatatacaagatgtcgtgataatagatctttttcatgctttctttctcagggtctttcgctaggaagaaggggactgattgctccacttgctggataagtttttcaatcgtcgaattaagctcataaatgtgaaaagaaacatactctgattgcggcttttgaatatttttatctcatagatttgattaagttaaaaatccaaaatttagatgaaaatcaaaatactttcaagtatattagaattaactaaacatacggatggtgttttctttatggttttaatatatatggatgggcaagataaatcagatcaaatcaaagattggaaaatatgtactgaaaaagattccgataaacttatgttgaaagctgaatttccatcagggaagttcttttataaacctctagatcaatgtgtgattgaacccacaatagattgtaaaggaaatttactacataataaaaaaaagaacacattcagtattattgagaaggcaatacattatggaaataaatatatcgtagtaaaatacccggaatctgaaaaactatatattatggagagtgttaacgctcaaattttatattcggcaaattttaaaaatggagaagtattctcatactttacttcagttgcaaaagaacgtttaaagtttactagtaagcatatagccgagaatataatacgacagttagaaagaattgttcctcattccggaacagctttaaatgcctattgtcgtggtgaaacagaaaaaagaacaccaaaaaaacatttaatattcccatttggattaaatgaatcccaattaaaagcagtcgaagcagcattttcatctcagataagtgtcattgaaggaccaccaggaacaggcaaaactcagacaatacttaatattgttgctaacatattaataaatgggaatacagtagcaatagtttctaataataatgatgctgtgattaatgtgtatgaaaaacttgagaaggtgaatttaggacatataatagcaaaattaggtaacaaaagtaatcagaaggagttttttcaatcattgattgagaatgataatgaaaatatacaagacgtaaaagaaatagaagaaatcgatgagcttgtccagaaattaaaaaaacatttgcatgcacaaaatcaagtagcaaggttaaaagctgaaatcaatgaattgtctgtagaattatcttatctagaaaagtggcgacacgaggaacgacctgatgtaaaactgatccctctaaaaaaatataaatttagtctcagaaaaatagttgacttaatggtttttttagatcatcaaattaaagcgaaagtttccttaaagaaaaaattccgattgctttttaattatcaaatgattcgtacaagatttcttaatgatattaatgagcgcgacaattttatttattcacttcaattcttgttttatcaacgtttattagaacggaaaaagaaaaaagttgatacttatgagaacgagctgaaaaaccaaaattttggagagctattgaaagatttaactcagaattctatggggtatcttaaaaattatttgagtgaaactattccatctaagtcatttaattttgagttggataattataaacaattatttaatcagttcttaaatagatatccaatcttaggaagtggcagtcaatcaataattaatgcaataggtaagggtacattaattgattatgttattatggatgaagcttctcagcaagaaataatttcaggaattttaagtgcaggttgtgccaagaatttgattgttgttggggatagaaagcagctaccacatattgagattaagagtgaaattgagccaccatctcctgtttatgatagtagaaaaatgagctttctagattctgttatctcgtgtttaaaagaggaaatccctataactttactaaaagaacactacaggtgtcacccgaaaattattcaattttgtaatcaacaattttatgacaatcagctaatcccaatgactgaggataatggagagcagtctttagagttgattacaacttcaaaaggaaatcatatgagatggaatgctaaccaaagagaactagagtcaattcttgaagtaggagctggggaagcagaagagactagttttattgctccttataatgcacaaatcaacttgtcaaaaaagtatttaggtaataatgtctctagttcaacaattcataaagtccaggggaaagagcgcaacaatattattttctcaacagttcttgataataagaaaagtagtttaagtaagatggattttgttgataatccaaacttagtaaatgtggctgtatctcgtgcgaagcataagtttacattagtaacaggtaatagagtttttttaccttataaccaagacattgcagcacttatccgatatattcagtactatgctgataatgatcagatacatgaaagtcctgttatctctgcgtttgatttactttataatgaatatgataaatcgctagagaagttaaaagtaaaattaaatgacaaagattctaaatttaaatctgaacagataattgcatcaattcttaaagaattgatgttacaggatgattttaaaatattacactttcatatgcatataaaattatctcaattggtcaaagcggacagtaattttacgaaaagagagcaaaaatttcagaaaagagctagctgtgattttgtgttttattataaggtaggtaaagtacctatggcagttattgaagtagatggtggttatcatgatacaccaatacaaaaagaacgagatagtgttaaagatagcattctggaaaaggttaaaataccactccttagacttaagaccactgatgtgaaagttgaaaagaaaattgaggaatttctcttaacaacaatcaatatgaaatattaatgaaaagtccttaaccttttttaaaattaggttataggactttttctatcataagaatttagtaactaatgttttttcaacaacccatatataagcaaattatcaaacttcccttttccatactcatattgcctcaacaatccttcacgcacaaaattaaattgttctaacaatttaacagaagttagattatcagggtctatcaatgcttcaatccggttcaggttcatctcctgaaacccatatcgcaacaccgcagcaatcgcttcgctcatgatgccttttctccaatgatcgtgatgcaattcatagccaatttccgtgcggcagtgctgttttaccaaattaagaaatccacagctgccgatgatagcaggatcatcttttaaagaaatgccccaccggatgcctgtttgttctttaaagatattgtcataccacttgatttctccttttgtgtcttcgatggtttcatgagcatcaatgcccatgtatcggcacactgtttcattggataaatagatatgcatatcctcagcgtcttcgatcgttgcttgttttaagatcagtctttcagtatgtattgttggaaatgtttgcggaaaggtgatgttgctcatttgattatcctccatgagatgttttttgttctgtacatgccttacaataaaaaaccccttcatttctcagccaagccttcacttctgtcataccttctctttggatagaccagcttgacgtactcttcttcgtttccttctatttttttctgacagctagcacacgtgggttcttcgaatcgaaacaatcgacatactcctttttgtagatatttcttccattatatcaaaagttcaagttgatctttcgactccattcttcactttttttgtttttgtccgacatatgctaagtaaaagaaatttccgtttgttgaaaccgtttgagagaaagcttgctctaacaggtgtaggaggtgtgagtgagatgaagcaagtgcgtctaattaaaaaagcacaaaaagggaatgtcccggcatcaaaagctagtcgataaataagagagcgaacatggttatacatgctcgctttttgtctgttgatgcaccagtcgattacgattgaatgagtacctaatcaacatcaacgcaacaaaactggctaacccgccaatccagcttaagttcgtgacatttgtatattgaatcatcacaccgccgattgacgatccgagcatcatgccaatattcataatcgctgtattaaagctcagcacggtttctgatgcttggggttttagagagatgaggtaaaactgctttgctggcgttgtcgtccatgttgcgatgccccatatggctagtgtgatcaagacgctaattgtagagaattgtgtgaaaaataaggcgaagagagcgagcatctggatcatgatgctgatcgagatggttcggtttggtccccattgatcaacagcgaagccgccaaatcgtgagcctataaaagcagcgattcctaaaatgagtaaggcgaaacttgtcatttcaagagagaagccagcggtttgtcgtaataaaggtgagatataagcgaataccattgtgtagcctaaaatccaaaagacggtcgtagctaagccgctgatcaccctgctatcttgaaggagatgtaattgttgcttcaatggcagatgtgaatgtccctccatgcgtggcagtaattgataaagcagtaataaaagacaagcagtacctagtgcaatgatgagaaaaatatagtgccaatccacatgacctgataaaaatgtgccaatagggacaccaagtacgagtgaaatggtaaaaccagtaatgaccgttgccatcgcacttccctttttttcgggaggggcgatctgtgctgcataattcgtggcgacgacaatatataagccgccgctcatggccatgatgacccgggatagcaggagcagcacaaagtgatggctaaaaaaggcgaccacattgcctaaaataaacacaaaaatagccgataacagaaccttttttcggttcaatttcgatgttgccatgactaaaaagagagcgcctactgcataaaagagagagtaaacggtgataagctgcccggcagcaggaatggagatgtgtaaatcaactgcaattatatctagaatgccagacacgacgaattctgaagtgcctgtgacaaatgaaccgacagctaaaagaataatcaatagctgatgagatgtgtttttcatttttgaacccttccttcattttgatacgttgtatttagtttaaattccgtgctaacataagtaaaattgatgtttttcatgaaggagatgagtgaatactcatgagttttgttcgctttgatattatcgcaaaagtagtggagcttggcagttttaccgcagcagctgaagcattaaatatgacgcagtccgcggtgagtcatgcagtggcgagtttagaaacggagtggggtgtgtctttattcattcgcgaccgaaaaaagggcattatgctgacagacatcggtcaaacccttctcccgcatattagagaagtgttaaatagggtggagaagattcagcaggaaattgcgttaacgaaaaatatcgaaacgggcttgattcgtatcggaacatttgccagtgcatctgcttgtttattgcctaagctgcttgtgagctatcagaaaaagcatccgaaaatcgaatttaaattttatgaggggacgtatgaagaaatactggagtggctggactctgggatcattgatgttggttttgttgtgaaaggccatgcagatgaagcctttgacttgctgccgctgatcaaagatgagatggtggtcgcttatcatcctcatcatcgattccaccagcagcccattgtagacataacagatttggcggatgaaccttttattatgccgactggcatgtatcaatcacatgtagaggatattttttctgaggcccaattgaagccggctactttatttgaagtacatgattgtacgactattgcccgtatggtcggggaaggacttggtgtcacgataggtcctgagttgtttttgaaaacgcagcagcttgtgcacattcgtcagctgaatgtgtctcatcatcgtgaggttgcgctcgcctgtccgtctctttcccaagcttctccggcagtgaaagagtttttccatgtggccgaaacggtttttgtaaaagagaaggatttagagaagggtgtataaagaactagatgtgattttccaaattcgtgtaataagacgaatgaagcggacatttctttgaaaaatgttcgcttttcgtattgtgttttaaaaatgaagttggtacaatagacacagaaatcaaatagatagaagtcgtataatcgcggggatatggcccgcaagtttctaccaagctaccgtaaatagcttgactacgtcaattcacactcgtttgatataaatcatgcattgttcttgttttatgtcacggtctgaattcacatatgtagtcaagcgtcccaaaactgttggggcgttttttatttgacttgtgaatggggcagactaaagcaaaaggacatgaagggagtcagttggcttgaaacagttttttcagtttgatgagttaggaacgaattaccgcagagaaatcatcggtggtttaaccacatttttgtcgatggcttacattttgtttgtcaatccgatcacacttgctttagtgtctgtaccggattttccagataaattacgaattgatcagggcgctgtctttacagcgacggcgttagcctctgccgcagggtgtatcctgatggggctaattgccaggtatccgattgcgattgcaccaggtatgggcttgaatgcctttttcgccttctcggttgttcttggcatgggcatcacatgggaagcagcactttcaggtgtatttgtttcaggattgattttcgttgccctttctttaacaggtttccgtgaaaaaatcatcaatgccattccggctgagctaaagctggcggttggtgcgggtattggtctattcattacgtttgtcggtctgcaaggctctggcattatcgccaataatgataatacgctcgtttcgattggaaacattcacagtggtcctgtcttattaacggtgtttggtatcgttgtgaccgtcattttaatggttcttcgagtgaatgcaggtgtcttcatcgggatgcttgtgacagctattgcaggaatgattgttggtcttgtcccagtaccgacgcaaattgtgggaagtattccaagcttatctccaacctttggacaagccttgattcatttgccagaaatcttctcgattcaaatgcttgtcgtgattttaacgttcttattcgttgggttctttgatacagcaggaacgcttgtggctgttgcaacccaagctggtttaatgaaaaataatgagctgccgcgtgcaggaagagcacttctggcggattcatcttcaatcgttgtaggttctgtccttggaacatcgacgacaacgtcttatgttgaatccagctctggtgtagctgctggtgcgcgatctggatttgcagctgtcgtaacgggtattttcttcttgcttgcgatgttcttctcgccgctattatccatcgttacatcgaatgtgacagcacctgctttaatcattgtcggtgcactgatggtagctccgcttgcgaagattgcctgggatcgttttgaaattgcagtaccagccttcttaacgatgattatgatgccactcacatacagtattgcaacagggattgcggttggctttattttctacccgattacgatgatctttaaagggaaagccaaagaagtacatccaattatgtacggattgtttgtgatctttattctctactttgctttcttaaatcattaattgttgacaaagggttaaaatgatctttattttaaccctttgtcttcttttttcagtgtgatagaaaacctttgcagtctaggaaggacgagcactgacgcggagcgaatttgacattcgtgagcaccaacgcgcaggactgacaaagaatgcgagggtttgtctacacgctgaagcagcagctcatggaagctgctgtttttttgttttgtctaattttcttaccattttaaaacctctgctgccctttatccgtctattcgtatgaacgtcaaggaatcttgactgaacagagagactccgctactttaataggagtcatcggaacaggacattcgtatgagcctgtttggattgtgctggataggagttgatatgaatgttagaaaaagatcaagagcaaagtacatcagacttaaaaaatgaagagccatcaatagatcaagaaacgaggcaatcccgcctcagcagaagtgccgcaaaacgtggaagaacctcgaaagcaaaagcagcagcggctgatgagcgttctgccattcagcgtatgctgcaaggtgtaggaggcgcgtttaagcgctatggctcatatggacttgagatgttaaaatcaccgagtcgagcaatcaatcaagtggaaacattacggatgaagtacgcctggatttcgattgtgttattcagcgtgttttttgctttaggcaactatgttcaattaaaggcgtcaaagacccgcttattaggctttggcattcattattcttttggcgacgcctttttgaaggtagcggtctttacattcattgtgttgacattgatggtgcttaccgtctggctgctcggaaagtacatgctaaaaggaaacatatcactgaaagaagtgatcatgaagtttggcgctgcgcttgtgccggttttagttttatccatcctttggcttgtatttgccatgctgaatattccatatgtgaccgtcatattatccgtgatgatgtttgtcggccttcagttgattgcggtcgtgctctttcgctcgattcaatcggagcatgatgccgaacgtggagatttgatgtatgcgggctgggtctttttattggttgagcttgtcatcatcgcgctgctctggagcattgtcggagagtatttgattccatcacttgttcctgttcgatttggataaacacactgaaagcctccttttttgaaaaaggaggctttcatgttgagaagaggaaaaaacgggtaaactcttggtaacaaagaccacctttgttgtcgaaagatatatgtgtttttctcgcgcaaatttgattgtatcaaggtatgttctctagtagaatatggggtgctttatttgatttttagtgcagggggttcgaatcgtgcttcaacaacttttatccaatgcgttcaccatggttttgatcattttagtgattaatattgtctatgtttctttttccactatgcgtttgattttaacaatgaaaggcagacggtacgcagctgcttttgctggtacgattgaaatgcttatttatgtcattgggttaagtatcgtacttgataacttagatcagatacaaaatgtcattgcgtatgcgctaggttatgggatgggaatcattgtcgggatgaaaattgaagagaagctggcacttggctacacaactgttaacgtgatcacaaaagaattggatgtcgatctcccaagacaattgagagaaaaaggatatggtgtcaccagctgggtagcaggcggtcttgaaggagaccggacagcattgcaaattttaacaccgagaaaatatgaactgcaattatatgaaacgattaaaacgctggattcaaaggcgtttatcatttcgtatgagcccaaatcgattcacggcggcttctgggtgaaggctgtgaagaaaaggagaattaaagaatgaccgcaaaaccaaagaagaagaaattctatgtggaagacaacatgtcgatcgatcaagtgttgtcccagatggcagcggaaggctactcgcctgtccgacgaatggaggagccgatttttcaagaaaagaaggaaaatgggacgattcagatcattccgattgggaaaaaaatcgtatttgaaggaaaaatagtctaaatccgaacattaaaacgacgacttcgtagattgttcgataaatccgttgacatcatgaacatccgttgttaagataaacatgaattcaaaacacgaacctcatataatcttgggaatatggcccataagtttctacccagttaccgtaaatgactggactatgcaggatagtgaacaaaactgacatggcgtttcaaaagcgaacagcgcttaccatggcccggtttgtgttgcttcctaacaatgcaatgcaaatcgggcctttttgttcggcgtttgacaagctgcttaggtttgggaagcgtgtcaaacgatacgaaatcgaatatcaacttaaaggtggggacaaaatgaagccgcttgtaggtgtcatcatgggaagtacatctgattgggaaacaatgaaaaatgcgtgcgatatcttagaggaattagacattccgtatgaaaaacaggtggtatccgcacaccggacacctgacttgatgtttgaatatgcggcagaagcaagaggtaaaggactaaaagtcatcattgccggtgctggaggcgcagcacatttaccggggatggtcgcagcgaaaacgacactgccggtcattggtgtgcccgtacaatcaaaagcactaaatgggctggattccttattatccatcgttcaaatgccaggcggtgtaccggttgctacagtagccattggcaaagccggtgcaacaaatgcagggcttcttgccgcgcaaatgatttcagcatttgatgaaacaatcgctgctcgccttgaagaaagaagagagcaaacaaaacagactgtactagaaagcagtgatcagcttggctaagcagaccatttttccaaacgcaaccatcggtattatcggcggaggacagcttggcagatatatggccgtcagcgcaaagcaaatgggataccgggcagctgtgttagatccagtcgcacaatctccttgtggacaggttgctgatacagaaatcacaggtgcatatagtgacctcgaagcgattcgacagctggcagaaatcagcgatgtcgtgacatatgaatttgaaaatattgattatgatgcacttaatcaattgaaggaagaagccaatttaccgcaaggaagtgaacttcttcttttaactcaaaatcgtgaaacggagaaaaaagggattgtagacgcaggctgtgaagtcgcgccttatcgcatcattcatgatgaaaaagagctggaagacgcagtggccgtgcttggtttgccagccgttctgaaaacgtgcagaggcggctacgatggaaaagggcagtatgtgatcaaggaaaaaggacagcttcacgaagcatctgaattgctcacacatggaacttgtattttagaaagctgggtcccatttcaaatggagctctcggtgatcgtcactcgttctattcatggggagattgcggtattcccagtcgctgagaacattcataagcataacattttgttccaaagcattgtgcctgcaagggtagaggaacgtattcaggagaaggcaaaagagctggcaacgacactggctgaaaagctggggctagtcggtacacttgctgtagaactgttcctgacaaacgagggagagctgctcgtcaatgaactggcgcctcgcccgcataattctggtcattatacgctcgatttatgtgagacgagtcagtttgaacagcacgttcgcgcgatatgcggtttgccgcttggcggtacagcccttttatcagagggcatgatggtgaacttattaggcgatgaagtagacattccaaaagagcatcctgagcttctcaaagaagcgaaactttatctatatggaaagcatgaagtaaaagccggccgcaaaatgggtcacatgacatttatgaaacagcttgatgatgaatggatgacaaacatcacaaagatatggactgaaagagatggaggaaacgggaaatgatcgaacgttacgcacgaccagaaatgtcagcaatctggacagaggaaaacaaatttaatgcatggcttgaagtagaaattctcgcttgtgaagcttgggcagagcttggtgtcattccgaaagaagacgttgtgactatgcgtaagaatgcaagctttgatattgatcgtattctagagattgaacaagacacgcgccatgacgtggttgcctttacgcgtgctgtatctgaatctctaggagaagaaagaaagtgggttcattacgggttaacatctacagacgtagtggatacggcgctttcatatctattaaaacaggcgaacgatatcttgctcaaggacattgagagatttgttgacatcctaaaagaaaaagcaaaagagcacaaatataccgtcatgatgggccgtacacacggtgtacacgctgaaccgacaacatttggcctgaagcttggtctgtggtacgaagaaatgaagcgtaacctagaacgttttaaacaagcaaaagctggcatcgaatacggcaaaatttctggtgctgttggcacatatgcgaacatcgacccgtttgttgagcaatatgtatgtgagaaacttggcatcaaagctgcaccaatttccacccaaaccttgcagcgtgatcgtcatgcagattacatggctactcttgcactcgtcgcaacaagcattgagaaatttgctgttgaaattcgtggacttcaaaagagtgaaacacgtgaagtagaagagttcttcgcaaaaggacaaaaaggatcatcagcaatgccgcataaacggaacccaatcggctctgaaaacatgacgggaattgcccgcgtcatccgtggatatatgctgacagcttatgaaaatgtaccgctttggcatgagcgtgatatttctcattcctctgctgagcgcatcattttaccagatgcaacgattgcactgaactatatgctgaaccgtttctcaaacatcgtgaagaacttgacggtcttccctgagaacatgaaacgcaacatggaccgcacacttggcttgatttactcacagcgcgttcttcttgcattaatcgatacaggcatggcacgtgaagaggcatatgatacggttcagccaaaggcaatggaagcgtgggaaaagcaagtgccattccgttcattagtagaagcggaggaaaaaatcacatcacgcttaacacctgaacaaatcgctgactgcttcgattacaactatcacttgaaaaatgtcgatatgattttcgaacgtctaggtcttgcataagaaatgggtcgcctgctagtcaggtgcccaatcctgaaaattgccaacattcaaattaggaggccaacctgaatgactgtgaaacaagaacttctctacgaaggcaaagcgaaaaaaatctatcagaccgatgacgagcatattttatatgtcgaatataaagactcagcgacagcatttaacggcgaaaagaaagctgaaatcgaaggcaagggcagactgaataacgaaatttcgagcttaatctttcaaatgctgcatgagaaagggatcaacaatcactttgtgaaacgactctctgacacagaacagctcattcaaaaggtgcagattgttccgcttgaagtggtagtacgaaatgtggtggcaggcagtatgtcaaagcgccttggcattccagagggaacaaaactggatacaccattaatcgagttttactacaaagatgatgcactcggcgatccgctcattacagaagatcatattcgcattttagatgcagcgacaccagaacaggtcgaggaaatgaaacagatcacaagacaagtgaatgaagagttaaagcaaatcttctcagactgccatgtaaatttaattgatttcaagcttgaattcggaatagatcacgagaatcgtattttgctagctgatgagatttcacctgatacgtgcaggctttgggacaaagatacaaacgaaaagcttgataaagacgtgttcagacgaaacctgggcggcttgacgaatgcatacgaagaaattttcaaaagacttggaggccataaacatgtataaagtgaaaatttttgtcagcttaaaagagagcgttcttgatccacaaggaagtgccgtgcagcacgccttgcacagcatgtcttatcaggaagtaaaggatgtccgtatcgggaaatacatggagcttgtcattgaaaaatcagatcgtgatttagacacagtcgtcaaagaaatgtgtggaaaattactggccaacacggtgattgaagattaccgctatgaggtggaggaggttgtcgcacagtgaagtttgcagtgatcgtcttgcctggctctaactgtgatatcgatatgtaccatgcgattcaagatgagttaggtgaacaagttgaatatgtatggcacgacgaaacgagtctagacggatttgacggtgtactcgtaccaggcggtttctcttatggggattacttaagatgtggtgcgatcgctcgcttctctaacatcatgccggcggtgaaaaaagcagctgcggaaggaaagcctgttctcggtgtttgtaacgggttccaaattcttcaggagcttggcattcttccaggtgcgatgagacgaaataaagacttgaaatttatctgtcgttcagttgaactcattgtagagaacagcgaaacgcaatttacaagcggctatcaaaaaggcgaatccattacgattcctgtagcacacggtgaaggcaacttctactgtgatgaagacactttagcgaagctcattcaaaatggccaaatcgctttcacttacggagacgatattaacggcagtgtcaatcgaattgcaggtataacgaatgaagagggcaatgtactcggcatgatgccgcaccctgagcgcgcggttgattcattactaggcagcgcagacggacttaaattgtttcaatctatcgtgaaaaattggagggacactcatgtcactactgcttgaaccaagtcacaagcaaattaaagaagagaaattgtatcagcaaatgggattgagtgatgaagaattcgctttaatcgaatccattattggcaggctgccaaactacacagaaacgggtattttttctgtcatgtggtcagagcattgcagttataaaaactcaaagcctgttttaagcaaattcccgacaaaaggagagcatgttcttcaaggtcctggggaaggcgctggaatcgttgatattggagacaaccaagcggttgtatttaaaatcgaatcacataaccatccatctgcgattgaaccgtatcaaggagcggcaacaggtgtcggcggaattatccgtgatgtattctccatgggtgcgcgtccaattgctgtactaaactctcttcgttttggtgaattgacttcaccgcgcgtgaagtacttgtttgaagaagtagtggcagggatcgcaggctatggaaactgtatcggaattcctacagtcggcggagaagttcattttgatcaaagctatgaaggcaatccgctcgtaaatgcgatgtgtgttggattaatcaaccatgaggacatcaaaaaagggcaggccaaaggtgtcggcaacacggtgatgtacgttggtgctaaaacgggacgtgacggtattcacggtgcaacatttgcgtctgaagaattttctgatgaatcagaagaaaaacgttcagcggttcaagtcggcgatccgttcatggaaaagctgctgcttgaagcgtgccttgaagtcatcaaaaacgatgcgctcgttgggattcaagatatgggagcggctggtttaacaagctcaagtgcggaaatggcgagtaaagcaggttctggtattgagatgaatctagacctcattccgcagcgtgaaacaggcatgtccgcatacgaaatgatgctgtctgaatcgcaagagagaatgcttctggtcattgaaaaaggccgcgagcaagaaatcattgatattttcgaaaaatacgatcttgaagcggtatcagtcggtcatgtgacagacgataaaatgcttcgtttactccatcaaggtgaagtcgtatgtgagcttcctgttgacgctcttgcagaagaagcaccggtttatcacaagccgtcaagtgagcctgcatactatcgtgagtttttagaaacaaaagttgaagctccagccatcacagatgcagccgaaacgttaaagcagctccttcagcagccaacaattgcaagtaaagaatgggtttatgatcaatacgactacatggttcggacaaatacggttgttgcaccaggctctgatgcgggcgtactaagaatccgcggaacgaaaaaagccctagcgatgacaacagattgtaacgcacgctatctctaccttgatccagaggttggcgggaaaatcgcagtcgctgaagcagcacgtaacattgtctgctcaggcgcgcgtccgctagcagtgacagataacctgaacttcggtaacccggagaaaccagaaattttctggcaaatagaaaagtcagctgacggtattagcgaagcatgccgcacgctaagcacaccagttatcggtgggaacgtctctttatataacgaatcaaatggaacagcgatttacccaactccagtcattggaatggttggtttggttgaagatactgctcatattacgactcaatcgttccagcaggctggcgatgtgattttcgtcattggtgagacgaaggaagaattcgcaggcagtgagcttcaaaagatgacagaaggccgtatttacggaaaagcaccagacattgatttggatgtagagctgacgcgtcaagaagctctgctagccgcgattcaaaacggtctcgttcaatcagcacacgatgtatctgaaggcggacttggtgtagcacttgctgaaagtacatttggaacagacggtcttggcgctgatatccaaatcgatttaaacagcgaagcttccttattcagtgaaacacagtcacgctttgttgtcacagtcagaccagagcaccgcgaagcgtttgctgcggcggtcaaagatgcgaaagaagtcggaacggttacaaatgatggtatatttactgtcaaaaatcaagaaggacaacaatggattcatgcagcggtcaacgagcttgaacgtgcatggaaaggagcgatcccatgcttgctgaaatcagaggcttaaatgaagagtgtggtgtctttggggtttggggacacgaagaagccccgcaaatcacatattacggattgcatagccttcagcaccgaggacaagaaggtgcgggaatcattgcaacagatggtgagaacctgacgtcacacaaaggccttggactgattacggaagtctttcaaaacggtgagctaaaggatttgaaaggaaaaggggcgatcggacacgttcggtatgcgacagcaggcggaggcggctttgaaaatgtgcagcctctcttcttccgttcgcaaaacaatggcagccttgcccttgctcataatgggaacttagtgaatgcaacgcagttaaagcagcagctagaaaaccaagggagtatttttcagacctcttctgataccgaagtgctggctcatttaattaagcgcagcgggcatatggaattgaaggaacagatcaaaaatgcgttgtctatgcttaagggagcatatgctttcttaattatgacggaaacagaaatgatcgtggcccttgatccgaacggcttacgcccgctttcacttggtatgcttggggatgcttatgttgtcgcttctgaaacatgcgcatttgatgttgtcggtgccacgtatttacgtgatgtggagcctggcgaaatgctgatcattaatgatgaaggcttgaaatctgagcgcttctcgatgaacattaaccgcagcatgtgcagcatggaatatatttatttctcaagacctgacagcaatatcaacggcatcaatgtgcatagtgcgagaaagaatctaggcaaaaagcttgccgaagaagcgcatgtcgaagcagatgttgtgacaggtgtaccagattccagtatttctgcagcgattggatatgccgaagcaacaggtattccgtatgagctcggtttgattaaaaaccgttatgttggccggacgtttatccagccgtctcaagcattgcgtgagcagggcgtacggatgaagctgtctgctgtgcgcggggttgtcgaaggaaaacgtgtcgtgatggtggatgattccatcgtacgcggtacaacgagccgcagaattgtcacgatgctaagagaagcgggtgcgacggaagtccatgtacgcattagttcaccgccaattgcacacccatgtttttatggaattgatacatccacacacgaagagctgattgcttcttctcattcagtggaagagattagacaggaaatcggtgcagactccattgcatttttatctgtagacggtttaatggacgggattggcaggaagtatgatgatccgcagcgcggtcagtgtttagcatgctttactgggaaatacccgactgaaatttatgaagatacggttcttccgcatgtgaaggaaacggtcctgacgaaataatcgaataaaggagcagcagtcaagatgagttgatatgctgctctttcattctgccgaaaatacatggaaagcagcagctaaaaggagtgaatgggatgtcagaagcatataaaaacgccggtgtcgacatcgaagcagggtatgaagccgtcaaacgaatgaaaacacacgtagaacgtacaaaacgagcaggtgtcatgggcgctctaggtggatttggcggtatgtttgatctatctgagctgccatataaaaagcctgttcttgtttcaggaacagatggtgtcggaacaaaattaaagcttgcctttttaatggataaacacgatacgatcggcgtcgatgccgtggccatgtgtgtcaacgatgtgcttgcacaaggggcagaaccgctctttttcttagattacttagccgttggaaaagcagatccgctaaaaattgaatccattgtcaaaggggtggctgacggctgtgagcagtctggttcagcacttgtcggcggtgagacagccgaaatgccgggtctttacacagaagaagaatatgatattgctggtttttcggtaggtgtcgttgaaaagaatgaaatcgtgacaggagacagcatcaaagagggacatttgctcattggactgagctcaagcggaattcatagcaatggctactctctcgttcgtaaagttttgctggaagacgctggtcttgatctgcaccaaacgtatgaaccttttacaagaccgcttggagaagagcttcttgaaccgacaaaaatttatgtgaagcccgttctcaaacaagtgaaagccggcaaagttgacggcatggcacatgtgacaggcggcggctttatcgagaatttaccacgtatgctgcctgaaggtcttggcgttgagattgataacggctcatggccagtaccaccaattttctcctttattcaagaaaagggtcagttgaaggcagaagagatgttcaacgtgtttaatatgggcattggctttgtcttagctgtaaaagaggacgatcttgtggatgtgattagtgaacttgaacaagatggagagaaagcatttctcatcggtcgtgttcaaaaaggagaaggtgtcacattcggcggtggaagcctctcatgaagaagtttgcgatcttcgcctctggaagcgggacaaactttcaagccattatagatacgttaaaagaagaacagtggcaggcagaggccgccattgtgatttgtgataaaccgggtgcgaaggtgctggagcgtgctgagaaagagggcattgcctcctttgcttttaccccgaaggcttttccgaataaagccgcttttgaacaaacgatcatcgaacagcttaggcttcatgaagtagaatgggttttccttgctgggtatatgagactgatcggtccgacattacttgaagcgtatagagggaaaatcgtgaatattcacccatctttgctgccagccttcccaggtcttgatgccatcggacaagcctatcaagcaggtgtcaaagtggcaggcatcactgtccattttgtcgatgaagggatggatacaggtccgattattgatcaagccgcgatttatattgaacaaggcgaagagcttgcatcgattgaaaaaagaatgcatgaactagaacacacactatatccaaaagtgatcaaatcacttttagaattatcttaatgaggtgacgaaggcatgacgatcaaacgcgcattaatcagtgtttccgataaaacgaatctagtaccttttgtgaaagaattaacagaacttggtgttgaagtcatttcaactggaggtacacataagcttcttcaagagaatggcattgatgtcattgggatttctgaagtcactggattccctgaaatcatggacggacgactcaaaacacttcacccaaacattcatggtggattattggcagtgagagaaaacgatgagcatatggcacagattgaaaagcatggcattcagccgattgatcttgttgtcgtgaatctctatcctttcaaagagacgatctcaaaagacgatgtaacgtatgaagaagcgattgaaaacattgatattggcggaccgggaatgcttcgtgcggcatcgaaaaaccaccaagacgtcacagtgattgtcgatcctcgtgattatggtacagtcgttcagcaaatcaaagaaggcggcgtgtcacttgagaaaaaacgtgagcttgcggcgaaggtattccgtcatacagctgcttacgatgccctcattgcagattatttaacgaactttgttggcgaaacagagccagagcagttcaccgtcacgtttgagaaaaaacaatcccttcgttatggagaaaacccgcaccaagcggcgactttctatgaaaatgctcttccaagcaaaggctctttggctactgcaacgcaattacatggaaaagaactttcttataacaatatcaaagatgcagatgcagctcttcaaatcgtacgtgaatttacggagccagcggctgtggctgtaaaacatatgaatccgtgcggcgttggtacaggagaaacgattgctgaagcctttgaccgtgcattcaaagcagatgaaacctctatttttggcggcattgtggcgcttaaccgtgaagtagacaaacaaacggctgacgtgctgcatacgattttcttagaaatcgtcatcgccccatcttttagtcaagaagcacttgacgtgttaacagcgaaaaagaatcttcgtctattaacactagatgtagaagcgaatcttgagaaaaaagaaaagcagctgacaagtgtccatggcggactgctcgtgcaggatattgacacgtacggcttagaggaagcaacgatctctattccaacgaaaagagaacctacagaagacgaatggaaagacttaaagcttgcatggaaagtcgtcaagcatgtgaaatcaaatgcgattgtcctcgcgaaagatcaaatgacagcagggattggtgctggtcagatgaaccgcgtcggctcagcaaacattgcgattgagcaagcaggtgaaaaagcgaaaggaagcgcactgggctctgatgcattcttcccaatgggcgatacagtggaagctgctgcgaaggcaggcgtcacagcgatcattcaaccaggcggttccattcgtgatgaagaatcgattcaaaaggcagatgaatacggcatcgccatggtcttcactggcgttagacatttcaaacattaaggggatgacagtgtgaacgtattaattatcggcagaggcggaagagagcataccatcgcatggaaagtgaagcaaagtgaacttgtcagccaagtatttgtcgcacccggcaatgatggaatgacagatgctgcgaagcttgtcccaatcgatgaaggtaatcatgaggcattaattcgttttgcaaaagataatgaaatcgacttaacgattgtcggcccagaggttcctttaattgcaggtgtagtggatgcatttgaagaggcagatctaaaggtatttggaccaaatgcaaaagctgcggtgattgagggctcaaaggaatttgcaaaagacttaatgaaaaactatgatatcccgaccgccgcttacgctaccttcacatcgtttgaagaagcgaaggcttatgtggaagaaaagggtgcgccaattgtcattaaagcagacggtcttgcagcaggaaaaggcgtgacagtcgctatgacacttgaagaggcgatcaactgtctgcacgactttttggaagatgaaaagtttggcgatgcgagtgcatctgtcgtcatcgaggaatttttaacaggcgaggaattttcactgatggcctttgtcaatggagaaaaggtgtatccaatggtgatcgcgcaggatcacaaacgggcattcgaagatgacaaagggccgaataccggcgggatgggggcttattcgccagttccgcaaatttcagaagaagtcgtccaaaaagcggtggaagatgtcgtcaaaccggcggctcgcgcaatggtgcaggaagagcgtccgtttacaggcattttatatgcaggcttaatgctgacaccagaaggctcaaaagtcattgagttcaacgcacgctttggtgatcctgaaacgcaggtggttctccctcgtcttgaatcagatctagttcaagtcttcctcgacattctggacggaaaagatgtggacttacagtggaaagacactgccgctatcagtgtcgttcttgcttcagaaggatacccggaggactacgcaaaaggcacaccaatcggtgctttgcaaacaacggtgtctgatgtcgtgaccttccacgcaggaacaaaaaaagaaaacgatcaattcgtcacaaatggcggccgtgtagcgaatgtgacggcatttgacgatacatttgaagcggcaagatcaagagtgtatgaagcggttgaagaaatcatgcagccaggtctattttaccgccgtgacattggcgcccgtgcactgaaggctgcggggaaatccgtttaattaaaacacctttctatctgatgagatggaaaggtgttttttgttcatgagaagggatgccgatcgaatatgaagaagtagtatgggatcacgagttgatgaggaggcagtatggtcattcaaggaatcattctatttgcaatcgtattacttattttatttgtcgtgttctcaaatctcatcatgaatgaagcaagaaagcaaaacaaagtcaaaaagagatcagccatgatgtatatgagcatgtctatattggtgagtatggcgattgtctcatccatttggaaattctttattaactgattcataagagaggaatgagtgtatggtgcaattgaagaaacttgcaaacgagcgtttttctgccttgatctgtattgattcatttaatgagcgaatccgtttggatgactatagcggcagggtgcgggatgtgattcagtcggtacttcaggaagcggcggactgtaaggtttctaaggtcattgtgaaagtaagacgtgagcatgtacctctttttttagaaaaaggctttcggcttgaaggggtgttttctcattatttcctcggaagtgatgcgtacggcatgtcgctttttctcactgaggatcgaatgaacagttcgtattggctggaggaagataagatcgtcgcatccattcaagcgaaggagatgaaaaaagaccaaggcacgtggcaggatgagtatgtgatgaggaaagccgatccgaaggatattcacaagctggcaaagctctatgatacggtctttgaaacgtatcctacgccaatgaacgagccagattatatccaaaaggtaatggcggaagggactgtcttttatgttgttgaacatgacggacacattgtgagtgcagcatccgctgaaatcaatgcgttatatggccatgcggaattaacagattgtgcgacccttccatcatacagaaaactaggattcatgcatcatttgattctagcacttgaaaaagaactccagtcgatgcatatctatgtcttttattctcttgcacgtgcactgtcctatgggatgaatcaagtgttttatcagctcgggtatacgtataccgggcgcttccaaaacaactgctatatttttgacaaaattgaagatatgaatctatgggtcaaaacgccgaatgaatcatgaaatggttctcatctgatctagcagaccagatagacggtacgccatgatactgagctgcagcttcatccgatcatcagtggatttgaggctgcagcctgttctcgtttcaatttgtttcagccggtagcttaatgtatgtctatgaataaacaattctcccgcagatttttgaatattttcattgtgtgccaaatacacttcgagtgtatggatcaggtcagccccttgttttttcgtaaaaagcaaaggacttaacagctccacgtaaaagtcatgcaaattcatacccgcttcattcatttcaagaagcatgccatataagccaagcttttgataatgaatgatgctttcgtctgtttttaaaagcggaaggagccttgctgcatactgcgcttccttcgcgctttttgcaaagagactgatctggtcataggctctcccgatgccaatgacaatcggatggacgggaaaaaaatacgaccaagtgctccggcactcctctgctgcgcgataccactccgcttcttgaaacgctttttttcctgcgggtgtcaggacaaaaatggaatcgagccttgcctttagtaaaaagggaatatgtctgcgttcaaagatcgaggtgagtaattgagagaggcgctgcatcatttgatgatcgagctgtgtgtgctgatgctgaaattgaaagtagatcaccacctgctcatcgctcatatcatattgcagctttgttgcttgttcgaccacgtagctttcttctgtatattgctgctgcaaaatatcatctaacaaatgtccctgcatttggttttctgtatcttgaatggccttttgcttcagccattcaatcgcatacactgccccggcatgctcgatggcaatcgcatctagatgatgccacgcttcctttttctttaaagacacaataaacccgaaaatatcccccatcgcaatcaccggacatgcggcgaggacaaacgctccgtacgtgtcatagacgagccggcctttctcctctgcctgcttaagaaggggcatggtttcaattggttcacgatctgtcagaaagccaaaggcaggagagtacgtcacttcatctttgatgagatgagccgctgtttgatgtaaaaagacatcaagcacgacaatgttcgctgcagtgagatgtgccagttcatctgtaatttgcgtcacatttttattccttacatttaattgggtcagtctttgatgaatcgctgatgaatatttaagctgatggagctgactgctcacgatttgttctaggacggcttttgtaatgtctgagaaattgatgtgcggcggaatttcgatgagcggaatgccgctatttttcgctgcttgaatgagtgatgctggaatgtcgcttaagtatacacctttataaatagcgatggctgatagcctttgagattgaatcaattcctcaagccggtcgcgtctttcttgattgtccgcgagtccgaatccggttgtgacgagtaattccccttcggaaagcctcgaggtgtcctcgataatttccacgatggtcacccactgtatgaggcggtccagtccattttctccagcaagcagctttgttcccttcatgatatcgagcgagagtgcatctttgacgagaatcgccatagactcatgacctccttttgaacactcttatacacgatgtataaaaaatgcgtgtgaaattcgggcatgtggcgaatggaggatgactgccctcttgattaagctaatcttataacaagtatacaaaattttcttgcgattcatgaaaaaagaaagatgcagctgctgacaagagagggaggaatggcaaagtggagacccgggattacttaatcaaaccgatgttgaatcagcattatcctgtggctgtgaaaggagaggggatttatttatatgatcgggacgggaaaaaatatttagacggctcttcgggggctgtcacggcaagtattggacatggcatacgtgagatcattgatgccatgacagagcaagcggaaaaagtgagctttacgtacagatcgcaattcacaaatgaaccagcagaagaacttgcctatgaattgagtacgctttgcccaggtaacctgaactggtctttttttgtcggaagtggatcagaggcaacggaaactgctatgaaaattgctattcagcattggcaggagcaggggaaggctgagaaaaatcacattatctcaagatggatgagttatcacggcatcacactcggtgcgctgtcgatgtcaggacatattgcaaggagagagcgctttgaaccattgctcgaaaagcacccggtgctgtctccgccatatagctatcgttcatggctgccaaaggaagagggcaagcaggtcgaatggtatgtccaggaatttaaaaccgtcattcagcgtataggaaaagagaggattgccgcttttattgcagagccgattgttggagcatcgggagcggcgcttgtaccgccagacggatattttgaagcgatgaagcgtgtctgtgaggaaaacgatattttaatgattgcagacgaagtcatgacaggctttggacgaactgggaaaatgtttgcgatggaacattggggcgtcgtaccagatattatggttctcggcaaaggcatgagtgccggctattcaccgattgcggcagccgtctcagcagatcatgttatcgcaccgattctgagcggttcaggttctgtgatggcaggtcacacctatagcggcaatccgctttcagcagccgtctcactagccgtcatacgatatatgaaaaaacatcagcttcctgaacgagcggatctgtctggccgatatttaatgaatgctttaaaggatttgcaaacaaaccatttcatcataggagatgtgagaggaaagggactgctcattggcattgagtttgtcgcagaccgcttatcgaaaacaccatttcctgcccatgctcaaatgacgcatttagtcgttgagacggccaagcaaaatggcttgctcgtttacccagcaagcgctggtgaggatggagtgggaggtgcagcggtcatgattgcaccgccgctttccatcacgcagcaggagatggatgaactcattcaattatttgagcagacaatcacgcaggtcgaacaagaagtcatcaaccgagggtttttcccatctgcgatgtagggaggaaagatgatgaacaaaacagcgaatgttgatgaagtgatcacgcattttagggacggcatgaccatcatgtttggcgggtttggcggcgtagggtccccgccatcattgatcgacgccatcctagaagccaatattaaagatctgacattgatcggaaacgatgcaggcttcccgcaaataggtgttggccggctgatcacagaaggaagagtcaagaagatcattgcttctcatattggctcaaatccaatagccggacagaaaatgcaggcaggtacactagacgttcatttttacccgcaaggcattctagcagaaaaaattcgagcaggcgggatgggcttggcaggcattgtgacagatgtcggcatggatagcctcaatctcgatgagaagcagctcgttccgctaaacgggaacacatatatccttgagcctgcgctaacagcggatattgccattgtgaatgccctcaaagcagacgaagcaggaaatctgatttttgataaaagtgcacggaatacaaacccgattgtggcgatggcaggagactggaccattgcggaagtggaagagattgtgcctgtgggcagtcttcatccagaagaaatcgtgacaccaggggtatttgtgaaccagatcgtgcaatcaaaaggagtgaactggacatgggcatgggagacatcgatttaagacaccgcatagccaaacgcgcggcgcaggaaattgaagatggtatgatcgtcaatctagggatcggcatcccgacacttgcagctgaatacatcccagcgcattacagggtgtggctgcatgcagaaaacggcattatgggggcaggagcctcaccagcacaaggagaagaagatccgaatttgtgcaatgcaggcggttttcccattacattaacaaaaggcggttcatacatggacagcacgacagcttttggcatcattcggaaaggtatgcttgatatgaccattttaggtgcacttgaagtaagcagtcagggtgatcttgcgaattggattgtgccgggcaaacgagtaccggggatgggcggagcgattgagcttgcgcaaaaggcgaaaaaggttgtggtggtgatgagccaccttgataaacacggtgagtcaaaggtgaaatctgcctgtacactgcccttaaccgctaagtcttgtgtggatctgattattacggatatggcagtcattgaggtcaaatcacagctgctcattttacgtgaagtcatgccgccgtttcagccggaagatgtcataagggcgacagaggccccattaattttagcgcctgatgtcaaatctgttgtgtagaaaggatgactgacttgcagccaattacacggatcagaagctggatgagagagcaccaagatgaagcgattgcgcttcttcagcaaatggtgcaatgtgaaagcacccaagggaatgaacaagatgtgcagcaaattgtagcaaataagctttccgcaattggttttgatgtagatgtatgggacattggcggagaagacctgctggaacatccgtatttctattccccgaggcgttcctttaaaggaagtcccaatgtcgccggacgattgaaggggaaaggcggcggcaaatccattttattaaatgggcacgtggatgttgttccagcaggagatacgaaacaatggacatatccgccctacagcgggcatatcataaacgggagactttatggacgcggggcaacagatatgaaaggcggaaatgtttctttactcttcgcactagaggcactgcatgcgcttcagattccgctgaaaggagatgttgtgtttcatagtgtcgtcgaagaagaaagcggcggtgcaggcacccttgcagccatactgagagggtatacagcagatgcggccatcattccagaaccaagtcatatgaaaatctttccgattcagcagggatctaagtggttcagactgtatattaaaggaagggcagctcatggcggaacaagatatcacggtgtttccgctattgaaaagagtatgatcgttcttacgcatatagcggcacttgaagaagaacgaaatcagcgcatcaccgagccgttatttcagcatatcccaattccgatccccatcaacatggggaaaattcaaggcggtgattggccgtcctctgtagcagatctggtcacaatggagggcagacttggtgtgatgccaggtgagacggttgagcaggcagagaaggaattagaaaattggatgacgggacttggggaaaaggatgaatggttcaaagatcatcctgtcgaggtcgaatggtttggtgcaagatggcttccaggctcaatcgatacgaatcatccacttttaagtctattgaaggaacaatatgaagcggtcaagaaggagccgccaaagatcgaagccgctccttggggaacggacggcggattactctcacaggcggcaggtattccgatcatcgtgtttggtcctggaacaacagagcttgcccattttccgaatgaatccatcgacattgagcatgtgattgaagcagcagaaattatcgcaggtacgatggtggaatggtgtgaagcagcggagtgatgaaagaggcggaaaataattacaaaaaaagaaggctgtctcactcagccttctctttatgtgtgtcctgctgctcacacatatacgtcactggacaaaaacgaagaatgccagatgccagtttcatcccgccgcacatgatgctgaaaagcagcattttactccatggttttctagcatataaagaaccagccacagtacatattgtcattccgcaggcaattcgaatgagcgcttccattaagccgagattaggtttcattgaaggtgaatctccttttttaaatattttaagtgtgatttcaagaatttgtaacgtttcattaatgcgtaacgtggttcgttatgttacgatagtgctaatacaaatgaaggagagtatgtgaatgtccgaacgtacttttaattggagaaacaatgacatccgcacacaaatcgatgtagtcgactcaaaaatagttccaacactccttttaacgaatggactcgtgctaaacccatttttgaaacaatgggtgaaggcaaatatttggatacatgatgatcgaattgtttatgtcggagcagagcttcctcaaaataaatcagctaaacgtgtgattgattgtgaagggaaatacattgtgcctgggtatatagagcctcacgcgcatccgttccatatttataatccccaatcacttgcagaatatgtgtctcaatttggcacaacaacgatggtcagcgataacttatttcttcttttgcagagcaatgaaaagaaagcgctttccactctgtgtgaattaaaacagcagccatttcagtatttctggtggtctagatacgatcttcagactgaagtcagatatgaagatgagatgcttcctatcaactatcgcaaggaatggattgatcatcctgatgtccttcaaggcggcgaattaacaagctggccaagattgatggacggtgatgatctcattttatattgcatgcaagaaacgaagaagcagagaaaacgaattgaagggcatttccccggagcttccgagaaaacgctaacaaaaatgaagctgtttggcgcggacagcgatcatgaagcgatgaatgcggacgatgtgctaaaacgcttgtcccttggctaccatgtctcacttcgtcattcttccatccgcccagatttagtgaacattttaagagaactgcacgagcgtgattttagacactatgatcactttttctatacaacagacggagctgcgcctcatttttatgaggaaggtatgattaatcgtttgatttcaattgcccttgaagaaggcgtgcctatcattgatgcgtataatatggcgacatttaacattgcaaaatactatcaaattgatgacctattaggtgttgtcggtcccggccggctggcttctttgaatattttagatgatccgatgaacccaaatcctgaaacggtgatatctaaaggggttattctcaaattggatggcgagaaccagcatcaatttcaagaaactaaatggaaaaatggcgggcttgttccattagatttatgctatgatctgacgatgagtgatttgcaattttccatgccgctaggtgtcaaaatgagaaatgctgtcatcatggagccttatacagtggagattgataactcggtgaaccagctgtcctgtgaccatgatcaaagtttctttagcttgattgaccgaaaaggcgagtggcgtgtgaatacgatgctcaaaggtttcgcaaacaaagtgcaaggctttgtcagctcattttcgctcacgggtgacattttagtgattgggaaaaataaagaggacatgatgctggcacataagagaatgaaagaaatcggcggggggatcgtcctcacagagaacgggaaaattttgcacgaaatcccgctgcaattatcaggctgtgcatcggctgaaccgtttgagactgttcttcagcagatacaaacattacgcgagctgctcattgagcgaggctatccatttgattgcccaattgatacacttgtctttttccaaagtacacatttgccgtatattcgagtgacaccaagaggaatatttgatgtcatgaaaaaaactgtactctttccgtctataatgcgttaaaatataacagagtggagctgtatcatctttgccacatttctgacagctgttatagggcagaagtgagcaatggatctcttcgctgccatgtaagtgaaaatgcttatgtggagttgttgaagcagagggctttgacatgacgagtgaaatgccctaattgaaaaatgaatctgtcggttacgctggccgaccaacatattttgaataattgagcgaggcggggcgcatgtttgtggtctcgccgagctttccgcacaagctgtattttagggcatacctaatcaagcagaagtgattctgatatcgaaagcaaacaagtttgtcagattgtcgtacaaggaaaatgacagaacttgtcgaatttgtatacgataaagaagcttcggcttacgaaagaactgacggcatttccagcgtagaaccaaacctgtcatgattcgttcaaagctcattgctgaggttgaaaaaaattagtcaggaaagataccgcttttcttcatagaatgtcgtgcgaagcggtgtgccaatagtaaaggagaagatgtataaagatgcaaattgataaattaaggggcaaaagcttagatcagttattcaactccatcttatcccttaaagacctggaagaatgctatcgattctttgatgatttgtgtaccatcaatgaaatccaatctttatcacagcgtcttgaagtagcgcgtatgcttcgcgaggggaacacgtatcataaaattgagacggaaacaggtgcgagcactgcaaccatctcacgtgtcaaacgctgcttgaactacggaaatgatgcctatacgatggcacttgaccgcgtagcagaacagcaggcaaatgacgaaacaaaataaaacagctttcactgtaaacaatccttttcaacaagaatggagttgtttacagtttttttatggagagcgctgaaaagacaagcaaggactggctgaatcaagcggtcctgttttttattttagctcgcctataacctcacgcatcctccatctcctatcatttgtctaagttctttatacgcgattgagccaaaatgtcaacgaaaaaaaggtgcgaaaacgcaccttttctcaaactagacagatggctgtgtccctgaaaacatcggcacttcacttgtctggccattttcttgtctgtagataatatgtttttcattaaaatgaatgggagattcaattccagcggctgcggataagttaaacaaaccttctcttagagaaaggatataattgcagactcggtatttcttttcttcaattgataaacccttttgcagctttggatccgttgtggcgaccccgactgggcatttattcgtgtggcacacttgtgcgcgaatgcatccgactgaaaacatgagtccccgtgcgatatttacaaagtcagcacccatggaaagggcaatcgcaattttatcaggtgagagaagtttgccggaagcaaagagttttacctgatctctgacaccgtattctttcaatatttgatgaaccattgggagcgccgtgaaaatgggcagccctgcggaatctgccaattcatgaaaggatgcaccagtgccgccttctccgccatccactgtaatgaaatcaggatgctttccgctttttttcatatacgctgcaagctcttcaatgttttctttatgtccgacaacaagcttgatgccaacaggctttccgcctatacttcgcagctgttcaatgaaatcaaacatatcaggaatggagtggaacatctcaaatcggtttgggctgtcaatggattgatggggcggcaatttacggatattcgcaatttcttcggtgaccttttcgccgtcaatatgtccgccgcgtgtttttgctccttgagccagcttcagctcaaaggctttgacttcctcgtgctcactttttttcttaaattcttcaaaggagaaagcaccatcctctgttctgacaccaaatagaccgggcccaatctggcaaatgatatcggctccgcctttgaggtgatatggggaaagcccgccttcacctgtgttcatccacgtaccgccagccatttttaatccagaggatagtgctgtaatggccctgtcgcctaaagatccgtagctcatggcagactgtccaatcaggccttttacacggaaaggcttttgacatgtgtgttcgccaatcacttgtacatcgtcttgatggagatagtaaggttttgcttcgacctctttggtatgttcacttcttcgcagtaaattgtcttgatcaatctgatacacttttgtatgaattttttcagattgatcgatgcgtaactcatctcgttgctttggaaaaaggacgttgcgaatgtagtaaccaggcttgtcaaaatcacgttttgatccaaagcccatcgtccggcttttgtacttcccagacatgacagcttgctcatattctcttcttgagaaaggaagctcctcccgatcattcagaaaaagatattggcgcagctcaggtcctattttttcaaaaataaaccgcagctttccaatgaccggataatttcgcaggacagaatgctcttcctgtttttcatctcgcatccaaatccagatgaataaaatgattggtaagatgaaacaaatcactaatagtgcgccaatgacaatgaaagttgttgtcacgaagatcccctcttttctctatcattgctgttgttattccacttttcattgaaagagaaaccacttcaacagattgtgacgtttagaaataaaaaggcggggtaacttacaaataagatcataaggggagggaacatacatgaataagcgtccaaatgcgtatgtacttgcaggattaggggttggtggtgctgtgttattagcggtaaaaaataaacagcatctcaaaaaatgggcaagcatgttccgctcagatgaaaagattcctgaaaaagccggacaccctgatccattagatattcaagacaacaagatggtcgatgaaggggccatgacatccgtccattatttcaatgaagtgagacaatagtttgaaaaaaccgttttgaccattcaaaacggttttttcttgtctttcttttgacgttatatcgaagaggatcgacaatcgtaaaaccgatcagccctttgtgatcaggcgtcgagaattgaaattcaatgcctgacaaatgataggttgagagaacttcctgatccgtaaaacgtaacgaaagctcgtcctcataaacgggtgcatgcttcaaaacctcggcttcttctgcaaatagctccagcccagccactcggccctctttatcaatatctgcattcacacattcatttacgtcaaattcaatggtttctttgattgttccgattctaggcgggatgagatcaatgtatccgatgtcgatcgtttgatcatatgtgatggttcttttcaaatcattcacctgcttattagatagtaaaatgttcctttattgtataatatcatgtgatgagacgaagcagctcgcatttcagttcagtattaatatatttatctcccttagtcctcttgaagtggatcttttcacatagtctccattagcctcatttagagttaaaatcgtccattttcaaaagaatgaaacttttagctgaaggaggttacccattttttgcggtcactgattttgttataatatttaaatggaatgaaacgaatggaggaacgtttttcatgtatgatgttaccgagtggaagcatgtctttaaactcgatccaaataaagaaatatccgatgaacagctggaggcgatttgtgaatctggtacggatgccatattgattggcggcagtgacaatgtgacagaggacaatgtgctccaattgatgtcaaaggtccgccgatttcttgtgccatgtgtgctcgaaatctcaacacatgagatgattgtgccgggcttcgatctgtatttcatcccgaccgtcttaaacagctctcatcctgattggattgttgggcttcataaggacgcgatgaaggaattcggtgatttgatgtcaatggaagagattgtgcctgaaggctatgttattttaaatgaagagtgtaaagcggccaagctcacagaggcaaatacagcgctggacatcgatgacgtaagggcatatgcaagagtggcagagcatttgatgaagctgcccattttttatctagaatacagcggaacgcttggagatatagagcttgtgaaagaaacaaaagcagtgcttcatgaaacggtccttttttatggcgggggcattgaaaacgcaaagcaggcagaagattttgcgcagcatgcggacgtggttgttgtaggaaacgtcatttatgacaatttcaaagaagcattaaagacagtgggcgcagtcaaaaagtcatcatagtcaaacaagacgaaacgggttaaaatagaacgtaagttcgaattggcggtgaatggaatgaatgaaatatcgaatcatctattagaagggctgaatgacgcgcagaaagaagcggtcaaagcaacagacggtcccctcctcttgatggcaggagcaggaagcggaaagacacgggtgctcacacatcgaattgcctacttaatggccgaaaagcatgtggctccgtggaacattttagcgattacgtttacaaataaagcagcacgtgaaatgcgtgagcgtgtccaagccattttagggcctggtgcggatgacatttggatctctacgttccacagcatgtgtgtgcgcattttacgacgcgatattgaccgtattggtgtgaatcgcaacttctctatattagacacatctgatcaactttcagtaattaaaaacattttaaaagaacgaaatatcgatcctaaaaagttcgatccacgcagcattttaggatcaatcagcagtgcaaaaaacgaactcattgacgcagaggaatatgccaaaacagccggtgatttctatgatcaagtggtcagcgacgtctatacagattatcaaaaacgattactcaaaaaccagtcactcgattttgatgatcttattatgatgacgattcgtctgtttgaacggatccctgaagtattagaacactatcagcggaaattccaatacattcatgtcgatgagtatcaggatacgaacagagcacagtacatgcttgtgaaactgctcgctcagcgttttcaaaatatatgtgttgtcggtgactcggatcagtccatttaccgctggcgcggagcggatattacaaacattctctcctttgaaaaagattatccgtccagtgaagtgattctgcttgagcaaaattacagatcgactaaacgtattctgcatgccgcaaatacagtcatccaaaacaatgcgaaccgtaagccgaaaaatctttggacagaaaatgatgaaggagcgaagatagcctattaccgtgcagataatgaattcggtgaaggtcaatttgtcgctggaaagattcatcagcttcatcagagcggtaagcgtaaattatccgattttgcgattctttatcgaaccaatgcccagtctcgtgtcatagaggaaacattattgaagtcaaacatccaatacaacattgtcggcggcacgaagttctatgacagaaaagagatcaaggacattttggcttacttacgcctagtagctaacccagatgacgacattagctttgcacgtattgtcaacgtaccaaagcgtggaatcggtgcaacatctgttgataaaatcgcagcatatgcggagatgaatgacctgtctatgtttgaagcgcttggtcaggtagatttcattggactcagtgcaagggcagccaatgcgcttgatgagttcaaacagctcattgatcaaatgacgaacatgcaggattatttatctgtcacagaattaacagaagaaatcctagagaaaacaggctatcgtgaagcactgaaggttgaaaaaacgattgaagcacaaagccgtctagaaaatattgacgagtttctctccgtgactaagaactttgaagaacaaaatgaagacaagtctctcgtgactttcctgacagatctcgccctcgtcgcagacattgataagctggatgagaatgaggaagaagatcaggatgccgtcatcttaatgactcttcatgctgcaaaaggtctagaattccctgttgttttcttaatgggcatggaggaaggtgttttcccgcacagccgttcattaatggaagatgcagagatggaagaagagcgccgccttgcctatgtaggcatcacacgggcggaagaagagctctatttatcaagtgccaagatgagaacactcttcggccggacaaacatgaaccttgaatcaagattcattcgagaaataccagctgatttattggacaacctaaatgagaagaaagaaacgaaaacaccgtttggccaaacaagagaaagaccgcaaagacggggacctgtctcacgtccgcaaactcaaaccattcaaaacacaggcggcggaagtattggctgggctgtgggtgataaagcggctcataaaaaatggggcgttggaacggttgtgagtgtaaaaggcagtggagacagcacagagcttgatattgccttcccaagccctacaggcattaagcgtcttctcgcagcatttgcgccaattgagaagcaataaaccgatagcacttataaaacggatgaattgaaaggaagaagcagatggataaagaagcagcgaaacgccggatcgaggaactgcaccagattttgaaccaatacaactacgaatatcatacacttgatcgtccaagtgttcctgacgctgaatatgatgcgcggatgcgtgagctgatctctttagaggaagagcaccctgatttaaaagcagcggactccccttcacaaagagtaggaggcgctgtgttagacgccttccaaaaagtgcgtcacggcacaccgatgctcagcctcgggaatgcgtttaatgaacaggaccttcttgattttgaccgacgggttcgtcaagcagttggtgacgatgtcgcatacaatgtcgagctgaaaattgacggactcgctgtttctctccgttatgaaaacggtgtgtttgtccgaggtgccacgcgtggagatgggacaacgggtgaggatattactgaaaacctcaaaaccattcgttccatcccgctcaaaatcaaacgtcctctgtcgattgaagtgagaggcgaggcatttatgccaaaaccttcttttgaagcattaaatgaaaaaagattacaaaacgaagaagagccgtttgcgaacccgcgtaatgcggctgcaggctcgcttcgtcagcttgatacgaaaattgcggcgaaacgaaaccttgatatcttcgtctacagtatagcggagcttgatgaaatcggtgttgaatcgcaaagcgagggacttgatcttctcgacgaacttggctttaaaacgaacaaagaaagacggatgtgccacacgattgaagaagtgatcgacctcattgaaacattgaaaacgaagcgtgccgatttttcatatgaaatcgatggaattgtgatcaaagtcgattcgttagctcagcaggaagagctcggctttacagcaaaaagtccccgctgggctgttgcgtacaagtttccggctgaagaggtcgtgacaaagctgcttgatattgaactaagtgtaggacgtacaggcgtcatcacaccaacggcgattcttgaacctgtcaaagtagcagggacgacagtgcagcgtgcttctcttcataatgaagatttgatcaaagaaaaggatattcgcctttttgatcaagtgattgtgaaaaaagcgggcgatattattccggaagtcgcaggcgtactgatcgatcagcgtacaggagaagaaaagccgtttcacatgccgactgaatgcccagagtgtcatagtgagctggtgagaattgaaggcgaagtggctttgcgttgcatcaatccagaatgccctgctcaaatacgtgagggactcattcactttgtttcccgtaatgcaatgaacattgatgggcttggcgagcgggtcattacacagcttttccaagaacagcttgtctctcgtgtgtccgatctctaccgattaacgaaagaagagctcattcagcttgagcgaatgggcgaaaaatctgtcgacaatttactgcgttcgattgagcaatcgaaagaaaactctctagagcgtttactatttggactcggtattcgatttattggctctaaagcggcaaagaccttggcgatgcatttcggcgacatcgatcaattaaagcaagcgacgaaagaacaattactcgaagtcgacgaaatcggtgaaaaaatggctgatgccgtcgtcacgtactttgagaaagaagaaattctcaacctgctaaatgaactaaaagagcttggggtcaatatgacctatacaggaccaaagccggtgaaggttgaagaaagtgattcctattttgcaggcaaaaccattgtactgacagggaaattagaagaaatggcccgaaacgatgcaaaagcagcgatcgaagcattaggcggcaaactggcaggtagtgtgagtaaaaaaacagatttagtcattgccggagaagcagcgggaagtaagctgacaaaggcagaagaactcaatattgaaatttgggacgaagctaaaatgctcgaggagctaaagaaataagaggagtgttttctattgaaaaagttgttattgctgctgacaatgctcacactggtattgtcagcgtgtgcaccttttgggggaaaggaagaggaagaggtcacacaaaaaacggatgaaacgaaggaaacagccatcatcccgatgtacaatatctctgactcctattacaaaatggtgctgccgtttaaacaaggggctgcgcgaggattaacagcagagcgtctcaacacacgcctggacatcgatgaatttgaaacaggacttatgcgccttgcaacagagtcatttaatacaaacgactatcttttccaagaaggacagcatttagatgaggacaccgttctcagctggctgtcgcgcaaaaaaacaggcagtgatctgaaaaaggcagaaaaagaagataaagactttaagaatctcggcttaaacccagctcttccaaactcaggttcaacaaagtctaaaaatgaaaatagtccaatttacttagcttcgatgctagaacataattacttaattcgaaaagataaaaacagcttacagcttggcggagttgtcattggtcttgcactgaactctgtttattattaccgtgaaaatatcggtgacccgcagcaagaggtgacgatcgattcatcgaaaagttcaaagaaacttttggcagaaggtgaaaaaatcgctgaacaagtgatcaaacgaattcgtcaaatggatggactgcaaaaagtgcctgtcatgattgcactttataagcaagcaccaaaatcatctatcgttccaggaaactttatcgccaaaacggatgtgaaagcaggctcagctgatatcggcaattgggatacgatcaaagaggagaatgtcttcttcccttcagataatgcgaaaggcaactacaaagatgattccgagcgatttgaccgcttcaaaacaaaagtcgaagactacttcccgaattacactggtgtcgtaggaaaaggcttttacaaaaacggcaacctgcaaaaaatgaaagtcgaaattccaatgcagttctatggaaaaacggaagttgtagccttcacgcaatatttaacaggtgaagtcatggattactataagagtaccaatatcgaaattaacatcacatcttctgatcaacaagaagccctgatcacgaaaaatgctgaagacaaagaaccaactgttcatatatatgactaaataaaaaccgcctattggcggttttttaaattaggtaaaatgtatcaagttatgaaaatattgttataaaaagtagaagtgtagaaaataatgtattattatgggtgataatgaagagaaaatggagatcaatatgaaaaacaaatcattttactttttattagggggacaatccctagctaattttggggattcgctatatgtcctcgttctgaccatcctgacatatcaattaacaaattctacactgattgcttcaatggtggctgtttcgcagtttgttggacaagcccttggagcggtactcattcctttctttatgtatcaatttaagctgaaaagactcattatctatttgcaaatgtgtcaaattgctttcttcggttgcttgattttcatttatattctacaactatcaacttttactattcctttcttttttatcattgtatttttcctgtctttgatagatggaggaaccattcctgttcgaaattcgatgatcccgcgtttagtagaaaagaactttttactaaaagccaatagttatatcttaacttctgatcaaattgttcttttactaggctggcttttaggagggctgtttattggtattcttggaccgcagtttctcctattgacgacacttgttttatacagtttgtcgctcatatctatgctctttatgattgatactggggctgcagctaaacatgagcaacagtctgaatcatttgctacaagggtcttttcagggtggaagctcatgtatgaaaagccaactattcgaacattaacggttttagaaatgctatccatgagcggtagaagtatctggactggagccattatccttgtgtatgtcacagaagtcttacaccagcctgaaacatggtggggctttattaacgcaagctattttggcggaaccattctaggcggcctgctcgtgctgcggttcgcaaagcatgtggaacagcgtttgtttgatcacattttttacagttcggtgatcgtagctgtgctaaccctttgcttaggattgaatcattcagcatggatgagtttgttgtttgtctttttattagggccagcttttcagcttcgcagcatttctattcgtacctatgtacaagatacactgagtgaaattgaattgcccaaaatactgtcagctcaacatacactatcaacttttatatacggaatgtccatccttgttatgagcaccatgaccgatctctttggggcaagagtcgtcttttttataaacgttgctctgtttactgtgtcggctttcctagcgtctagattaaaaaatgaacaaatttagacattttatctcaattatttacaaaaataccgttatatgatttaatatgttcgtagaaatgttaactatatgaaaagtagaggtggcgtaattgactagtagtttagtatattggccattaacacatccgcagcggcgcgtgatgaacatggaaacattttatccagaaacaccgatcaatcatattggcggtatcattttcgtcaatgggccgttgcagcttgataaactgaagcaggccattgcatcttgtatcatgatgacagaatctcttcgtctcaagctagtagagaaagatggtgagacgcttcaatacgttgatccaaacgccgataatccaattcctgcctatgagttttccacacatgaagacatgctagaatgggccgaaaaagccttcaaaacaccatttcaattaacagaaacccctctcgccgaatttgctgtattaaaagtcggtgaacaacaatccggttatttcatcaaatgccatcatacagtagcagatggatggtcgatgaaagtaatcatcgataaaattagccagctttacactgctcttacccaaagctcctctatcgaacaagaagcagacaatcattctgtatttattgataaagaatcaaaatatatgaactccccaagatttaaaaaagatcagcaattttggaaagaaacattatctgatgtgtctgatagttatttggtacagggaactgaccaaatcaaaggccatcggcacagccattaccttgatcgacaactctcagaacgaatctatgaatttatagatacccatcattgttcaatcaactctttatttactttaggactcttcgtttacttgcataaaagataccagcaaaaagattttattattgggacgccagttctcaatcgttccggacaaaaggaaaaagccacgtccggtatgaccgtcagtacaatgccatatcgaatgaagatcgatcctcatctatctttgttagaaagtctgacagacgttcaaaaaagctataaggcttactttctgcatcagcgttatccttatgatgcacttgtcaaagatttagagcttgccaaagcaggatatgatcagctttttcaaatctatatcaactcctacagcacaaatatggtgcaggagatggaaggatacaaagttgaatacatagagctttacaatggcttccagccatatggcttacaagttgctgtgaaagaatgggatgaaaaagggcaaatcgaacttcaatatgactacaagatctcagattacagcaatgaagacatcgactttctacacgaaagaatgcttctctttgtcgaaaccatactcgctcagccaaagcagctgttaaaagacgtacttctcatgacagaagacgaggaacatcgagagctatatcaatggaacgacacgggcgtactatttccacagaaacaaaaaatccatgaattgatcacagacatgtcaaagtcttctcctgatcgaatcgcgcttcaggacggatctcatatcatgacatacggtgaacttgagagaaaaaccaatcaaatggcgcgttttctacaaacacatggcttacagagacatgactttgttgcagtatgtatgaatcattcaccagaacttattgtgctgctgctggggattttaaaggctggaggtgcatatgttccgattgatcctgagtatccgcaggaacgcattcagtttattttggatgacagccaggcaaagctgtttttcacagatcacgcatctgcataccattttaatggcggtacgtacaatatctacaacgtgtgggatcagttggctcagtatgatgcggaacatccattcattggggatgctgaagacgtcgcatatatgatttatacgtctggctctacaggacagccaaagggagtcatgattgagcacagaagcttagtaaactatattatgtctgccaaaacacattatactgattcaccagatgatcattttgccttgtattcatccattgcatttgatttaactgtgacatccatttatacgccattggtcattggcagtacagtggtgatctatcgtcaagaggatcagccaggctttttattagaacatattttgtttgatcaaaaagcaaaagtcatcaagctgacaccagctcatatggcactgttaacagatgctgcactttctcaatcagttgtgaaacggatgattgtgggcggggaacaattatcgaccgctttggccaaaagaatcacagaggcaagtgatggaaggatatccatctttaatgaatatggaccaactgaagcaaccgtcggctgtatgattcatcaattccatcaagatgatggggggacatcggtgtcaattggtgtgccaatgccaaatacagagatttaccttttagatgagaatcagcaagccgtgcttcctgggacagtaggagaaatctatatttcaggtgcgggtgttggcagagggtattggcaaagacctgatttgcaagaatcgcgctttctgcccaatccatttgtaaacgatcgccgcatgtatcgaacaggtgatatagccaaacgagcaaatgatggaaagattgattacattggcaggattgatcatcaaatcaagctgcgaggctaccggattgagctgggtgaaattgaacttgcacttatggcacttgaagaagttgataaagcagctgtcattgatctaaccgatgaatctggagaaaaacagctggctgcttatattgaattgaaagaaaaagagctgacgtcctttttacttagaaagaaattatcagatcagcttccagcttatatggtacctgcctattttgttttactagatgagcttccgcttactcaaaatgggaaaatcaatcggacagcactgcctgatccattgttgtctcaagtggaaacagccgttgaatggtccaaggaaacagcggacattgaagagatcatagtagatacagcaaaagacatcttagggcatgaaacgatcgaaccggctgatcatttttatcagcttggcggtgactccattaaggcgattcaatttattgcgaagttaaaagacaaaggactctatttaaaaaccaaagatctttttacgtatcccatttttagagaaatggcacaagtcgttcagcaggaacctgtcttacatatttcacaagagcaggctgcgggcgatgtgaaatcgatcccaattatcgaatggttctggtcccagcgattaaaagatgaacatttttggcatcaatccatcattgttcattcaaagaaaaagatggatgaaaaaatcgtgcaggatgctttcaaagagctcgtcattcatcacgacggactaaggttaaaagtacatgaggcaacaaacacgcttcattatgatgaagacattcagggtattccgctgatgatccacgattttacggcattgtcagaagagaatgtggaagaagcgctacaagaagtagggtgtcaggtcaagcaaagaactcatctttatcaaggaccattgattcaggcagcgctttgtcaaactgcttttcaatcacatctcatttttgccgcccatcatcttttagctgatggtatgtcatggcaaattcttgtggaggacttgattcaattattgcatgcagagaaggtcacagctgaagtgcttccgcctaaaacccattcctatcaaacatttacagagcgggtgaacgagtatgcagtatcagaggaggtaaaagagtcgctcagctattggcaaaaagcggtgcaggatattcagcctctgtatccagtttcttcaaatgagggatatgtcagagacgaagtcaaattaaccaaggcattatcagtggagctcacggatcaattgatcaatcaagcgaataaagcgtatcaaacgcagcctcacgaactgttaatttcagccttaacgcaagcctgttatcagcaaacgaatcaaaagaggatttctttggaattagaaggtcatggcagggatgctgtggaggaagatattgatgtatctagaacgttcggctggttcaccaccatgtaccctgtgaatgttcatgtgtctgaatctctctcagatcacatacgggctgtcaaagaaacgatacgtgaagtgccaaataaaggtgcagactatgggctgctctcactcatcaataggcagcttcctaatcattcagcgccgcaattacgctttaactatctaggtgaaattgatcaggtgctgaaacaatcatctgattatgagatgtcttactttacatcggggattgattcgtcattggataatccgttaacaaccgtcatcgatatggtcgctaccatcaagggtggtcagctgatattccatctttcttttagcgcaaaacagctgtgtgaaacagacatgacgcagctattacaagaggtagagcggcaaattgagcgtttggtacagcattgcttagagaaagaaggaatcgaatttacaccgtctgattttgaaacagtggatatgtctcttgaagaaatggattcattatttacatgaggaaaaatcagcatgttatctacatgtcatgtttattagcggtcttatggataagcagctttgccggggggacacatgcaaaagcagtgattacacctaaagccattgatcaagtgatagaggaacagatgaagcttgggcgcattccaggcatgtccgttgtggttgtgaaaaaggacgaagtggtgtaccaaaaaggctttggttatgcggatcgaaagaaaaaggagcaagtgacagccagtactttctttgaaattggttctacatcaaaggcgtttaccgcccttgctattgtggagttagagaagcaaggaaaacttcatataaaagatccagtgagcagctatattccaggtttttttccaacataccatggaaagcctcagcgtttgacggtggagcaattaatgcatcacacaagcggcattccctttcaaaccattgcgcttatccagcctgatcatgcaaaggatgcattgaaaaaaacagttgatcagctgaaatcaatcgagcttaatcgtaagccaggcagctcctttgaatatgccaccatcaactatgatgtccttggtctcatcattgaaaatgtaacaggaacgtcgtatgaggcttatatgaaagaactgtttaaaaggcatcatcttgaccaaacggaggctgggctaaaacgcatgaagtccggtgttgtctcagaaggatttaaactgcaattccttgctccgcatgcttatgaagcaccagaatatcgaggcaacacccctgcaggctatattgtgatgaatagtcaggatgtggggacttggctgcaatatcaattgaccgattcaacttggtctcgttttgtaaaaaatcctgatcatttaactgtgaatgtcccagaagaagggaagcatgtctattacaatgccggctggtatatagaaaaggcgcatgggcaggtggactcgctttttcatgcaggctctaacccaaactattcatcattttttctgatccagccaaaagaagatattgctatcggagtgttagcaaatatgaatagcagctacaccgagcaaacggcacgtcttattgccaatacgatcgcgggtacaaatgaagaagcagagtcatcaatagatccatttcagctcattgatcaattgagtttagcagcgacatgtctttttattttgctgcaaatggtgtctatcgttcgttttatcaagtggaaaaagcgtgtaagaaacggcgctttagttcgcagggacatgtcacttggcgtctggctgaaaagcatcggctgggtgctgctgctaattgggatattgctcctgccaatgattctttcgcaactagcctttaatgggctgccttggaaaatgacttttgtatggggaccttcctctctcattgaattagcgatttcttattatttgtttttcatttggttttgtacgattggtttcatcaaaggatttatggtgacatctactgctggaaagagaggaaaaaaagatgaccgtcaaacagatttcgggcattcatccttataatgatttgttttatcgaagctgtttcttcaattgcttttttccaattgtgaagctgcatgatcaagaagtcgctccatacttattaaatgatcaatttgcctatgggctttcagaggacggcttgctgcagattgactggatgtcggcacacgatccagaaaagattatgaatttacaaggcattcaagttgaaaaaatgacgtattgtgtcaatctcattgaaaaggtcaaacaagatgtgatgcgggaccgccccgtcattgtttgggtagacccttacgttcagagaggcagaaaagagtatttgacaacccatagccgtcattcaattttaattaagggtttcgatgaaaatcagcaaacctttcaagtattagagaatcggcatttagataatttgtcttatgagcatcaagtgctgtcatttaaagatgtacagaaagggtatgacacctttcatgatcattttcaaccgaatgatcaatttcattcctatgcgtccttctactttgatccggacaagctctcgactgaattatttgatcaaaaaacgacttatttcctgagaaatatgcatggtcagatagacgtaatcgaaaaaggaatcacagctcttgaaacattttatgagcagtatccgcaattggatgatatcgagaagctcgtggcgtcgttcaatcagatcatcaatacgaagaaagtggagctgtatcggctgaatctcatcaaaggcgatctacctgagctggtgggatggatggaacgtattgtatcagaatgggagaaagcgaggcatcaggcagcaaaactccttttttcaggtgagatgtctagtaggtaccaagccaatatcaaagcttctttagaacaaatcatcgttgatgaaaaagactggctggaagcgttggcaatcaaatgcaaaagggagtgtggcgtgtcgtgaagttattttgcttaccgtacgcaggtggggcaagtaccgtattcagtacgtggaaatcttatatagaccagtcgatagaaattcatgcccttgaactccctgggcacgggacaagaatgacagagcctgttctaaccgatttacagcaggtcgcagatgatctttatgtacaggcgtcctcctctttaaaagaaggagagccctatgccattttcggtcatagcatgggagccgtccttgcgtatgaattacaaaaaagaatgaaaacaaggttaaacaaagagcctgtccatgtcttttattctgggcgctttccaccacatattccagaaaagaaagtctatcatcaactgtcagattccaaactaaaagaggcgatcattgcgatgggaggcgttcctgaggaacttgccgataaccatgcagtgcttgatttctttctgcctattttaagagcagactttcagcttttggagacctatctgtgtgatgaagtcgttccagctgcttgtccaatttctattttttatggtacacgtgatttgccttctgtgctgttcgatttagacgattgggatcaatatacaagcgaagattgtgcgttttttgaattcgatggagatcacttttttattcattcattaacaaatgaagtcgtagaaaaaatcaatgtcattttaaagcgaattggagtgttggagaaatgaacacgaagcacgtaggtgtgattggagcaggtgtgatgggggctgatatggcattagacctttcagcaaatggctatcaagtcacattagttgatgtcacagaagaaaaactaaatgaagcgctggaaaaaatcaagaagacctatcaactggttcaatttgtgagaaagaagaaaatctcattgtctttagaagatgtattgtctcaaatccagctgtcaacttcacttgaaggcttacatgacgcgcatatcatcattgaaaatgtgacggaagattgggagattaaaaaacccatttatgaagagctgcgagatatttgtgcgaaagaaaccatctattttgtaaacacgagctgtatttcgattacaaaggtagggtcccttatgcatcaccctgagaaggtcattggggcgcactttatgaaccctgttcctcttaaagcgttggttgaagtgattagaggaaaagcaacttctgatgacacagttgaaaccgcaaaaggtttcttgaaatcgtttgataaaacacctgttgtggtgcatgattttccgggatttgtttccaaccgtgtgcttatgctgacaatcaacgaagcgatttgggcggtgcaagatcaagtcgccacaccagcggatgtcgataaaattttccgcggaggtttcggccataaaatgggaccacttgcgacaggggacttaattggacttgatacgattttgaattcattgcttgttttatacgagagctacaaagatccgaagttccgtccatgtcctctacttgtcaaaatggtcgacgcaggcgagtacggcaaaaaatcaggtaaaggctttttccaatatgacatgtgagaggagaaaaacaaatggctaagcaaatcaagtgtgttgtctgggatttagatcatacattatgggatggaattttacttgaatcagatgaagtgatgttaaagccttcgatgaaggaagtgctaacagaattagatgagcgcggtatccttctttctattgcaagccggaatgatgaagcagccgtgagggaaaagctctccgcctttgggatcgagcatttctttctctatccagagattcattggaatgccaaatctagttctttagagagaatcagcgagcgcctaaatattcataaagataccattctctttattgatgatcagccatttgaacgagaggaagtgaaggctgttcatccagagattacgtgctgggatgcagtggattatatgtcattactcactgatgatcggctgcgtccagtctttatcacagaagatgccagacgacgcagaagaatgtatttagaagcggaccaaaggcagcaggaagaagagaaatatgaagggccgcctgagaaattcttggcgtctttacatatgaaattcgtgatttcagaagcaggagaacaagacctccagcgagctgaagaactgaccgtccgtaccaatcaattaaatgcgagcgggaaaacctatgattatgaagaacttgatttcttccgtcaatcagattctcacttgctgcttgtctgtgaacttgaagataaattcggttcctatggaaaaattggactctcattaatagaagaaacaggcgacacctggcatgtcaaactgctgcttatgtcttgccgcgtcatgtctcgtggtgtcgggaccattttactcacaacgattttgcaagaagcgaaaaagcgaggaaagcggcttgtggctgactttaaacaaaccgaccgaaaccgcatgatgtatatcacatacaagtttgcgaatttcaaagaaatcgagaagggggaggatggctatatcttgtttgaaaatgatttaagcatgattcagcctttcccagaatacgtagatgtcaatattgaattaaatcagaaagatccagccaaacaataaaaaagcgaaaagcgaggagattaaatcatgaacctacacgaacaagtaagagcctatatcgagcaaaacctagtggtatttgatgaggaaattgagcttggaaatgatgatcatatttttgaacaaggctttgtcaattctctatttgcgatgaaactagtgaactatatcgaacatgattttcacttccaattagataacgaagacctcgacattgctcattttagtacggtcaatcgcattgtcgccttaattgagagaaaacaacagggggccgctcttcatgaaaacagctgaacaaacgatcgatgccattgaagaaatacgacagtattgcgatgaacatatccgtccgtttgccaatgaattcgacgagacggaacatttaccagagtcgctcattcgagatatggcgaaaagaggctacttggcagcaggtatcccgtcttcctatcaagggctggggcttgatccaatagcatatggacagttcacggaacaagtgggaaaagcttgctgtaatgtacggacattattgacagtgaattcacttgtaggagaagccattcttcgttatggaacagaagaccaaaaacaaggctggcttgttgaattagctaaaggagaaaaaatcggtgcctttgctttgtcagagccgaatattggttcagatgccaatcatgttgaaacaagctatcaaaaagaaggacaatcctatgtattaaatgggaagaaaaagtggatttcctttggagcgattgcagatttctttattgtgattgcaagagacggtgaacaagtcacggcattccttgtcgatcgagatcagccgggtgtagagattgagagaattacaggaatgatggccaatcgagcatcatatttagcggaaatcactctagatcatgtccaggtgcatgaagactgtgtcttaggacctgttgggggcggatttaaccacgtggtgtcactcgcattagaccatggaagatacagtgtcgcttgggcagggcttgccatcgcacaagaagccgttgattctcttgtcacgtattcacgtaaaagaacacagtttaatgaaaaattgtacaagcatcaaatgatcaaaggcatgatcggagatgcggttacccagctccatgcagcgagagccttatgcctaaaggctggagaaatgagagaagcgaatcaccctgatgcgatcacagaaacatccattgcaaaatatttcacctctaaaatcgccgttgacattacaaatacaaatgtccaaatccatggcggaagtggatttagccgggaaaactcagcttcaagactatatcgtgaagcgaaggtgcttgaaattattgaaggaacttcgcaaattcagcagcaggttattgctaactatggtttacgccattatttcgtgaaacattcttagagagaaaggagatgatcccatggctttacagccgcagaagctggataaacagaacattgaaaatatgttaggtatcactacgatccaagagggactgctgtttcatcatttaatggaaccgaacggaacggcttattttgaacaactgctgatcgaaatagacggaccgatagatcgagacatttttgaacaatcatggacgaatgtcaccaaacagcatgaaatgcttagaacattgttcagatggcaggaactcgcaagaccagtacaaattgtgctgaagcagcaccagccagacattcgatatcgtgatttgacacaagcgaaggagcctcttcatgtgctgaaagaggaggtgacggcacagaaccgagaagaacgctttgatctgcaggaagtcccatttcgcctgacgttatgtgaagtgaatgatgaattcagctgggttctcattagcttccatcacattttattggacggatggagccttgggattgtattaagcgattggatgagtgcatatgagcgcttatcgaatggggacaaaccccttcttgaacaaagaccgtcctaccaatcatttgtcaaatggcagcaaaaaaaccttcaacagacagaagcacaagccgcctattggaaaaatgttttcaatggctggagttatgcagaactgcttccgaagtcaagcggcgcatatgaaaattcagaagtttttcatcaatatgaacatcaagtggatacttccattgcggagagcctgagcaaattcacgaatcaatatgacgtgacgctcgcatctgtgatgtatacgctgtggggagttttgctatctaagtatgccaaccaagatgatattgtctttgggacaacagtatcagggagaaatgcggatgtccctcatattgaaaagatgacagggctgttcattaacacattaccgctgcgggtctcattcgaacaagagcggccgattcttgaacagatgcaggaagtgagtcgtgagatagctgtaagaaatgaatatgaacatacaccgctatctgatttaaagaaatatgcaggaatgacggcagagcaatcgttatttgattcaatcgtcgtcattgaaaactatccactagatcaaatgctcacgaaaaacgatcagcctattcgtattcgtggatttgagatgactgagcagacagaattcgatctcacgcttagtgtccaggcgtttgatgatcagctgcacttttcattggtgtataaccccgtcagcttttcagctgaacaaatcgaaaagtggtgtcagcattttcttcatctcctgtctgatgcctgtgctcatccgctcaaatctgctgctcagctacagctgctatcagaagaagagaaaggaaagcaattagctgtcttccggcagtatggcggggcaacatctagcaatgaaccaacggtgattgacctttttgaagcacaagtggaacgaacgccagcggcagccgcagttgagtttggcgatacgacggttacatatgaacaactcaataagagagtgaaccagctcgcacattatttacaaaacaaaggagtcaaacaggagcagcgtgtcggcattttagcagagcattccattgaaatggtgatagcatgcttagcgatcttaaaagctggcggtgcatacgtgccgattgatcctgaatacccgcaggaacgaatagaatatctattagaagacagcggagtagaatggctcttaactcatccaattaaagggctcacctatgcctatcatggagaaagaattgatatcacacagccggatctatacaccggaccatcagacaacttggcagaagccatcacctcagaccaaacagcctactgcatttatacatcaggtacgaccggaagacctaaaggtgtactcattcatcatcttggcttagccaactatattgattgggcgaagcaagtatatgttcgaggagaaacaaggcattttgctttgtatacttcactgtcctttgacctgacggttacttctattttcacgccgctcatttcaggaaataccatcatgatttaccaccatgaaaaccggcagctgcttgtcgaagacatcataaaagataatcgcgtacatgtgatgaaactgacaccatctcatttacagtttattaagcatttgtctttcccagacagccaaatgaaatgtttcattttaggcggagaacagctggaaacatctctagcgaaatccattcagcagtccttcccgcagccaattgaaattgtgaatgaatatggaccaactgaaacggtggttggctgcatgattcatcgatatgaccaggattttgatcaagacgtgtatgtaccgattggaaagcctgcacagcatacagatattcttctttttgacagacatatgaatctcatgccggaaggaaccgtcggtgaattatatattggcgggaaaggtgtcgcaaaagggtatttgaatcgaccggaactcaccgaagaaaggtttgtcgatcaccctttccagccaggtgaaaaaatttataaaacaggtgatgcagcccgcattctgcctaatgggctcattcaatttttaggtcgaaatgatgatcaagtgaagctgagaggctatcgtattgaaacaggtgaaattgaattttggctgaatgaacagccaggtatgaaagcagcagctgttgttgtaaagccagatgcttctggtacaccatgtttggccgcatatgttgtcacgacagccagacttgatcaagctgcaatgaaacaagcgttggctgatcagctgccggattatatgatcccaactcactttgttcaattggacgatatgccgctgactgccaatggcaaactagataaacgggcattacctgctttgaaacaggcgcagcaaacgaataagcaggcgggcgctgccaatctttctgatactgagaaagtcattcaagacatctggaaaaaagtcctcggcttagatgaggtaagtgttcatgacaaattctttgacattggcgggcattcactcaacttaatccacgtcaatcaacagctcgctaagcaattgaatcaaagcattccaatggtcgaaatgttccgccgtccaacgattagagagcttgccgcatatttaagcggcgattcagagcaggtagcggcaggcacgcagcctgtgaaacaaaagacaagaaaagccaatgagccgattgccattattggaatggctggtaaattccctggtgcgaaaaatgttgaggcattttggcgaaacttgaagaatggagaagaatcaatttccttcttttccgatgaagaactgcttgaagctggtattgaccgtcagaccttcgaacgacccgattatgtgagggcaaaaggtgtgattgatggacctgatttatttgatgcatccttcttcggctattcgccaggtcaggcagaaatgatggatcctcaaatacgcctcctgcatgagtacgcctataaggcgctggaagatgcggggtatgtgcaagaagattatacgggtaaagttgggttgtttactgggtccacatcgaactttcaatggattcagcgttttgcagcttcccttgatagcagcatgtcagagctgtttgaagtgggttcactcaatgatacgtataccgtgagtacaagaattgcccataaattgaatttgaaaggaccggcgctcacgctgcaaaccgcttgttcgacttctttggtcgctttgcatttggcctgtcaatccattgcaaatggtgattcagatgtagcacttgcaggaggtgtgtcgatcctgcacccagtgaaatcaggctacgtttatcagcagaacatggtgaaatcaagcgatggccattgccgcgcctttgacgatcaagcagatggaacggttggcggagatggtgttggtcttgttgctttaaaagcactgagtgaagccatagaagatggtgaccatatttatgcggtcattaagggctctgccatcaacaatgatggtgatcaaaaggttggtttcaatgctccaagcgttgaaggacagacacgtgtcattcaggatgccttacatcaagcagatgtttcaccagatacgattgaatatgtagaaacacatggaactggaacatcacttggtgatccgattgaaatagaggcgctaacaaaggctttcgacacagagaaaaaacaattttgccgtattgggtctgtcaaaaccaatattggacatttggatgcagcggcaggagcagctggcttgatcaaagctgtgctttcgcttcagcatcacacatttgtacctagtcttcacttcaaaaaagccaatgaaaacattgcatttgagcatagccctttctttgtaaacactgagctgactgactggaagcagccagcttcacatttgcggcgggctggggtgagctcatttggaatgggtggaaccaatgcacatgtcatattagaagaagcaccacaaagagatcgtcagcaaatgcctcgttctgctgagctgcttgttctttcagcaaagagcaaaacgagcttggaacgaatgaaagacaaactcgtaaaccaaatagaaaacacgccttctatcaatttggcagacgcagcttatactctgcaaacaggaagacagttctttggtttccgtcaggcatttgttgcggcaagcagagaagatgctttgcgagtattaacagaaaagcaaggcaagggcattggaaagctcatgcattcgcatgtggagcaacaaaagattatttttatgttttctggacaaggcaatcaatatctcaatatgggattagatttgtaccgggaagagccttactttaagaagcaaatggatgcttgttttcaagcatatgaagaagcaacggggcgaagtcttgcccgtattctttacccattagcggctgaaacagaaaaggcgcgtgaaaaattagcaagtactcaatatgcacagccggccatttttgccattgaatatgccttatccatgctcttcattgaatggggcattcgtcctgatgcaatgatcggctatagctttggcgaattaacggcggccgctatatcagggctattcagcttaaaggacgcaatgtccatggtcgcctatcgtgcgaatgcgatgcaatcgtcaccagctggcgtcatgatgagtgttccattacctgaggcagagctaaaaccgatgcttccaaaaaatatttctctcgcggttgtcaatgattcctcatgtatcgtgtcaggtctagaagaagcgataagtgaatttgaacaagagctgaaaagcaacagattgatgtgtatgcggttaggtggaaccattgctgcccactcacatgtcatgaaggaggcagcggagcaattcggagaaaaattaaagcatatgaaagccaaaacacttcgtattccatttatttcgaatttgtcaggagattggatgacagatacgagtgcgaaagatatgtcttattggaaaaggcatatgaccgatacagttcgctttgctgaaggcatcaccaatattttacaagaggacaatattcaattaattgagattggaccaggacaagatttaagcgtgatggtcaacaggtcattgaacggcctgaatcagcatgtatgtcatgtgttaagacatgcaaaacaagatgtgacggatactgaatttttacttagtcaaatgggacgtctatggacaaacggattatctattgattgggacaggttccatctaaaccgtcagccgcggaaaatgccgctgccaacgtatgcgtttgatcaaacctcctattggtatgatgcagcagatcgtgtgaaacaagaaaaaccaaagcagtctggacgaaagcaacaaatggatgaatggttctatacccctcattgggaagcggatcttttaccttgcgtgccatcagaagatacatctggcggagccttgcttttgtttgcagagccatctgctctcggagagaagattgcggctgagctcctgacgaaacggaacgagttcgtagtggttcgtaaaggaaatgaatttacgaagcatgacgaaaaaagctataccattcggtcacatgagccatctgattatgaaaggctcatttcaaatctggcagatgacgaaatgaacgtgtcagaagtttgtcatctatgggggctttcagaacgacagccatctcacacggaagaagaatgggtgaagcaaacgcagcaagatgcttattactccttgctttatatcggccaggcattgaaaaaatatgttttggaccaaaaggtatcgattaccgttctttcctcattgacatatgctgttggcggtgaacctgtactttatcctgaaaaagcgatccatctaggacctgccatggttatatcacaagaaacaccgaacttgcgttaccgcattcttgatattgatcgcccggtggaaaatggggttcaagaaaagcgattgctgaagcaaataagcgatgagctagatcgagcgtatggacagcttctcacggtctatcgacgaaataagcgatatgtgaaaaagtatgcgaaaggttcagttcccgaaacaggacatgctcatttggctaaaaaagatggtgtctacattttaattggcggacttgggtttattggattgaatatcgcccagactttggccgagcaaacgaagggaaccttaatcttaacgagcaggtctggactccctgatagaagcaagtggcaagaatggctgtctacgcacgatgaacaggatccaacaaagaaaaaaatacaaaaggtaatggcactggaagagacaggcgcagacgttctcatacagaaagtagacgttcgtcacagggaagatatccagcaattgatcaacacagtggatgcgtcatatggacagatcgacggtgtgatctatgcagctggagtgacaggcgaccaatctttccgggtgatggagcaaacagatgtcacattttcggagccgcattttgaagcgaagatgaatggcgtacttcatcttgatgccgccttaggtgatcgatcccttgatttctgttttgtactgtcatctttgtcaccgatcttgggcggactcggttttacagcctatacagctgtgaatcatttcatcgatgcgtacgtgtatgaacgcaatctacgttcagaaacacagtggtctgtcattagctttgacggctgggaatttgagcaggggaagcagctcgatcttccaatcggagatgatgtcaccgaaacgttaattacagaaaaagaaggaagaatgatctttgaacgattgctttcactggatcaagtggaacaaatggttatttcgacaacatctttacatgatcgtattcacagatatgtagaccgtttatcccgtgaggaagagagcggcggagagcatgtacaagatggaaacttgtattctcggccagcgctttcaacgaattatgcggcacctgaaacagagctggagaaggaattaagtcaacattggcaagcattctttaagattgatgacattggcatagatgatcatttctttgaaatgggtggagattctcttaaggcgattaccttcattggcatcattcatcgtgcatttagtgtagagctgacgctgccacaatttttccaaatacctacgatacgattaatggcagcatatatcgaccaagcagatactgctgcttatcatgcgattgaaaaagccgaagtgaaggagcattatcctctgtcgtctgcgcaaaaacggttgtatctcatgcagcaaatggatgtaaacagcacaggatacaacgagtttaaagcggggcgaatcaaaggaaaactcgatatcagcaggttggaatgggcatttcagcagctcattaagagacacgaaagtttgcggacagcgtttgtactagagaatggcgtcccttatcaaaagattgaagaagaggtaccatttgcagtcacattgtttgacctcacaaagggatcgacacaaggatctgaggaagatcaaaaacaagtgattgaacaatttttgactgcctttacgttaagtgaggctccattgatgagagtcggtgtgatgaagctggcagaagaggaattcgtgctcatgctggacatgcatcacattatctcagacggtctttctcaagatattttggtcaacgactttatgcagttatatgacggcaggacgcttgagcctctcgctctgcaatataaagatttttcagaatggcaaaatgacatgcttgcgtctgaagcactgaaagaatcgagtgattactggaaaaaccggttagagggtgccccgctacttgatctgccaacagatttcgatcggccagaggtgagacaattccgcggtggacattatacattccgtatagaagaagcggagctgaacgcgtttaagcaaatgattttaaaagaagacgccactctgtttatgggtctgttaagtgtgtatcagattttgcttcataaattaagcggacaatcagatatcacggtcggggttccggtagcaggcagaaaacaagaggagctgcagcaagtcatcggtatctttgtcaatatgctgccacttcgtttatatcctaaagcagagctgacgtaccagcaattccttcaggatgtgaaggcacatgtcatcggtgatttcggacatcaagaatatcaatatgaacaaatggttcaagacctccagttaagccggagtgtcagccggaatctattgtttgatgctgtgttcgctttgcaaaatatgaatcagccagaactgaaggtaggcggtttaacctttagtgattatccgtatgagacaggaacgtcgcgctttgatttactctggattgcgtatgagcaggaagatggtctttcttcaacgattgaatataatactgagcttttcagtgaggaaaccattcagcggattgcaggcttgctgaaagacatcatgcgggctgtttcagcagatgcgatgagaatagaagagatcgaactgacttcttcattcaagcaattagacgacgtatctcttttcgaattagatgacttaaaaatataagtaaagaggtgaatggaagagtgattgaacatgatgattttcaactgaaagcagcggcgaaggaaagggcgttagaaagagcctactggacatctgtcttatcaggtgtacaactggatggccggatccctcatacggtttcacaagcccattctgctgcaatgaaccgatcgcttcattcgtccttccctgtggctatgaaccattcgttaaagcaattatgtggagattctgatttgcgcctgtttatcgtgctgaccacagctgcttttggcttgcttcaacgttatagcggaaaaactgagttgatggtgactgttcctacaatggaacagtctgccaatcaatcagccatcaatcatatgctgccgcttaaggcagagattgagcctcatatgagctttagcgcagggctagaggcagtgaaacaatcgtttcaggaggcagtgcgtcatcaaaactatcctgttcatattttaatggatgagctttggcattcagtaggagaagacaagaagcgtgtcaatctggcatgtgcgtttgagccattgcatgggcatgctgaccgagagcagctgcatgcggatgtgctcattgtttggaagaaagaacaagattaccttcatgctgaagttcactgggatgcttccatttatgacgatcaaatgatggagcagttctccagacatttcatgacactcacagagcaatgtctcaaaaccccggaacaagcgatgagcacacactcatttttatctgatatggagaaaagtcagctgtttgattcgtttcaaggagagtcgctcgcttatccagtggatcgtgatattgtgtcgttatttcaagaacaagtccaattgcatccagcacgaacggctgttgtgtttggcaccacctcctatacatatgaagaggttgatgatttatcgaatcgcattgcacttagactgtctcaaagtgagatgacacgtgagactcctgttggactcagaatgaatcggtctgctgaactggtcattgccattcttggcattttaaaggctggctatgcttatttaccgattgatgtccatctgccgatcgaaagaattcggtatatgctcaaaaacagcggtgctgcagctattgtctcggatgcagaaggatatgaaggattggatgtcgaggttcatgtgattcaagacatgcttcaagaatcgccaataaaagagaatctgacttggtctatttcgccttcggatatggcgtatgtcctgtatacatcaggaacgacagggcatccaaaaggggtcgttattgaacatcgtcatgtcattaatttggtatatggaatgaaaacgcgcttttttgatctgctccctgatcctttgcaagtagggatgctggcttcacacatttttgatgcgtctgtgcaaacattgttcccggcattgctcctcgggcatacgctgcatattgccaaagatgaagtccgtatggatgggcatgcgttatggtcgttttaccaagaaaaccacattcagctgtcagatgtgaccccttctcacttaaagctgatgaacaaggcagcagcgcaatcaaaacaagacctgcctgctttgaacatgctgctggtgggcggagaggtgttcacaaaagagctgatggatcaatttttacagcatgtatcaggtgaaaaaccgatcatgattaatgcgtatgggccgactgaatgtacggttcagtcatcatcctttttgattccccatgactgggacgagcaggtcattcctattgggcagccgatgccgaatgagcatattttcatatgtgacgcgcaaggggagccagttccgattggcgtctttggcgaactatatatagcaggcgatggtgtaggtcgtgggtacatcaatcaccctgatctgagcaaggagaaatttatcaaaaaaccagagctgagcagcgggatgttatacggtacgggagaccttgcaagatggcggtttgatgggttgatagaatttgctaaaagaaacgatggccaagtgaaaatcagagggtatcgaattgagctcgaggagattcgcagagcgattcttgatgacccgcatatgcaaggactgattcaagatgtcattgtcattcctaaggaaacgaaggatcaggaccaatacatttgcgcatatatgatggcaaaacaagcgatagatcagcgtgcgcttcgtcagtctttaagtgaaaggttaccaggttatatggtgccgaggcatgtcattcaaatagaacaatttcctttgaatctatcagggaaattggatatccaagcactgccgaatccagaagatcaagtggcaggcaatcaagagccgttgaccattcaagcacataatgaaacagagcagaagcttgttcgcattttcgcatctattttacaagtccctgctgcgcagatacgtatagatgaaccgtttttcgatttaggcgggaactcttttaatatcgttgaactgtccaataaagtgaaagaggaatttcagcaggagctgacagtgatggagctgttccaatatacaactgtttcgcaaatagccgctcaattgagaaccaaagtctcagggcaagagaaacagatcgaaaatgatggagaaaatgaagcggatgacttagaaagtgccgctcaactgttaggcgggatgatagatgagtaagttcacaggattagaggttgcagtggttgggatggcctgccgttttccgggagcaaagaatattcatcacttttgggacaaccttgcaaatggaagagagtccattacgttcttttcaagggaagagctgctggaggcaggggttgagaaagaagcattagaccatgagcaatatgtacgtgctaaaggagcagtcgatcagcatgatcactttgatgcagatttctttggttattcacagcgtgaagcagaagtaatggacccgcaaatccgcatgtttcatgaggtggcatgggaatcccttgaagatgcaggctataaccctgaaacctatcaggaaccgattggtttatttggagctgcttctgctaatttatattggcaagctgcttccatgctgatgagaacgaatcactcatctgaacaatttgcggctgttcaattaacagataaagatttcatgaacacaaaggtatcctacaaattgaatttgaagggaccgagcgtagctgttgatacagcttgttcttcctctttgactgccattcatatggcggcgcgcgccctgattactggagaatgtaaaatggcactcgcaggcggcgtcaccattacgacccctcacaaaaaaggatacatgtatcaagagggcatgatcatgtcgccagatgggcactgccgggcttttgatgaacaggcagaaggaaccgttggcggcgagggctgtggagttgttgtgctcaaatcattaaagcaggcactaaaggataaggaccatatctatggcgtgattaaaggttcagcctataacaatgacggcgggcggaaggttggctacacagcaccaagtatagaaggacaaagcgaagtcattaaaaaggcactcaacatcagtcgtgtagaagctgagagtatatcttatattgaagcacatggcacaggtacaactcttggagatccagttgaaattgagtcactaaagcaagcttttcaaacggataaaaaacagttttgtgcgattgggtctgtgaaaaccaatattggtcatcttgactcagccgcagggattgcaggttttatcaagacaacgcttagtctgtaccatcagatgctgccgcctagccttcattataaaaaaccgaatccgaaaattgattttgaatcaagcccattttatgtaaatacaacacccgtaccatggacgaaatcagagcagccgctgcgtgccggtgtcagttcatttggagtcggcggaacgaatgtacatctgatcatggaagaggcacccgccgccgacaaaccgtcagtagaaagagatcatgaactaatggtgatttcggcaagatcgaagcaggcggttcaaaagtctgctgaacaaatgacctcttatttaaaagaacataagcatgtcacactatccgatgctgcatttaccctgcaagagggacgaaagcattttccttatcgacaagcttttcttgcaggtccgggccgcacattccagtcagccggccagccgcaaaaggcctttcaacagcctgcgatcgtttggatgttttctggtcaaggtgctcagtatgtgaatatgggcaaggatttatatgagaaagaccctgaatttaaagaaacgcttcagaaatgttttgccattattttatcgttatcaggtgttgagatcgagaacgtgttatatccaacaaccgaagaagagttcatagaagcagaacaactcatgcagcaaacatcatatacacaaatcatcttgtttagttttgagtatgcgctcgcatcgaagctgatgggactaggcatatgtccgcattatttcattggtcatagtattggagaaatcacggctgcctgcgtggccggtatgatcaaccttgaagatgccatccggatcgttttaaaaagaggcagtttgatgcaaaaaatgcctccaggtgaaatggccggtgtgtcactccctgccgaagagattgaacatgatcttccagaaggtgtcgagctttctgcagtgaatagctcacaattatctgttgtttccggtccttcagaacggttacagatttatctcgaacaagctgaaaaaagaggagcttctgtccaaaagctgaaaacctctcacgcctttcatacgagtatgatggatgaagcgtccgaacagtttaagaacgttctctcggagatcacctaccagcagggcgagattccgatcctttcgaatgtgacagggagctggttaacaaatgaacaagccgcatcacctgattactgggcatctcatatcaggcagcctgttttatttagtcaaggagtagagacgttacttggacttggagaagtggttttcattgaagtggggccaggtcatacgttaactcaatttgtgagacgacatgatgactatgatgtgaacaaagcagcggctgtttcaatggtgagacatccaaaagaacaagctgctgatgatgaatatatgaaaaaggctatagggaagctgtggagttttggagtggaaccgaattggagcgctgtcagaaaagaaaaggccccatatcgagtgtcactgccaacatatccattcgagcatcaaatattcccctctccgcagtttaaagcggatcagctgatgaccgctttagcgccatcagaaaagggggagaaactctcagctgattttcaagactggttttacattccggtatgggaacgctctgcacctgtactaaaagagcagcatcatcaagggaagcgtatcttggtttttgagaaaaatggtcatattggcgcttatttgaaagaacggcatgcagaggttgtcagcgtctgtcaaagtgatcatacgatcaaagaaaatgaccagttgatgaaggcggacgttcatatgctgtcacatttagagtgggtgatggctgaactgcagcaatctgaatttataccggaagagatcatctggatgcatgatgaactaacagaagatacaggtgatcagccaaactacttatctgtgctcgatctcgtcaggctgatcagccagtatcataacacagccatccgtcttcatcttgtgacaaaccaagcgcatgatgtaatcgggatggagaaggtcaatcctcttcaagcaacatgtactgggctggctctgaccattcctcaagaatatcagcatattgcgtgtcagcacattgatttatgtcaggaaacaaaggcggactggccgctatttctttcatacgaggttgcaatgcacgatcaagatgcggtcgtggcgtatcgcgtgaacagcaggtgggttcgaaaggcttcaagcacccctttaaacaaagaggaatcgtccaagcagcctttcaggactcatggcgtttacctcatgaccggcggtatggggggcattggcttcacattagctaaacatttagcagaaacgtatcaagtgaaacttgtgttcatgagccgagtacaaatacgtgaacgctctgcatggcttgatctgcgtgatgcggaggggaaagaagctgaaaccgtgaaaaagctgatgactcttgaagagttaggagctgatgtacaagttgtacacggtgatgtgtcagatcaagatgctgtgcagaaagcggtccagctggctcatacgtcatttggtgatttacatggtgtcattcatgcggcaggagaggcagacgggaagatcatccaagcaagaacagcagacgatgaaattcgcatgtgtcaggcaaaaatcaacgggacctatgtgctggatgaagcactcaaggatgaaacgctcgacttctttttactttgttcatccctagtgtcctttcttggagcggctggacaagtggcttatgcggcttccaatgcttttatggacagctttgctcatgcgaagaggcaggaaggaaagccagtgatttctttaaactgggatcggtgggaaaaagtcggtatggcacacgactcagcattagcggctaaagtcaatgacatgatggcacttgaggagcaggcgggaattttaccagaacaagggataaaggcctttcaggaagtgctgcgtctagattatccgcaaattcttgtttctgttcgagacatgggtgagagaatgaaacatcgattaacacctatgcagcaggaagaagagccgtctcaacaaatatcgaaggtcatagatgatcgtctagaagcatcattgagtgatgtactcagctccttttttcatcatgaaccggatgtgaatgagaacttctttgaaatgggtgcgacatcccttgatttgctgcagatgagcggtcatatcaaatcaatttatggcatagaggttccggtagtcatgatgtatagccacccgacgatcgcgtcattggctgcagaactgaagaagatacatggagtgaaggaagaaaagcaagctgtcactgaatcatctaatctccgcaaacaggcgatggcagatgggaagaatcgccgcaaacagagattaaaacgaaaatagatgggagaaatgcagcgtatgtctgatcaagagcaatggagcgaatctggacttgaaattgcagttgtaggattagcaggtacgtttcccggagcaccgaatgtgcaaacgttttgggaaaatgtatcgcaagggaaagaatccgttacgtttttcactgatgaagaattaaaggcagcgggtgtagatgagacgctgctaaagcgttctgattatgtgaaggcaaagccatttttacaaaatgcatcatcatttgatgcagacttttttggctactctccgcgagaggcatccattatggacccgcaaattcgattgatgcatgaatgcacatggcatgcgctagaggacgcaggttatgagcctgagcaatacgaaggattaattggtctttatgccggggcatctagcaatctatcgtggatggggcagcatatgtcgtcacttgaaaagaacgaagatgtatttcaaatcatgcatctcaatgacccgtcctttgcttctcggattgcttataaattaaatctaaaaggtccaagcgtatcggtacaaacggcttgctccacgtcgcttgttgctattcatatggcctgtcaaggattaatcggaggtgaatgcgaccttgcgttagcaggaggtgtcactctccatcagccgcaaatcacaggctatcaataccaagaaggaatgatttactctcctgatggccattgccgtccgtttgatgaaaaagcaaaaggaaccatttttggtgagggtgcaggcgttgttgcgctaaaacgattgaaagatgcgatagaagacggagattttatttatgccgtcgtaaaaggatctgcaacgaacaatgatggaagcaataaagtcggctatacagccccaagtgtgagtggacaggcaagtgtcattgaatctgcgttagaaatggctgagacagaaccagagacgatttcttatatcgaagcacatggaacgggtacgcctgttggagatccgattgagattgaggcgcttacccgtgcttttcaaacagatcaacaaggctattgccggattggatcagtcaaagccaatattgggcatttagatgctgcaagcggcgtggctggttttatcaaaacagtcatgatgctgcatcatcgtcaatttgccccgatgccgcactttgacaagccgaatcaccgtattccgtttgatcaaacgccattttatgttgggacagacaaagaggagtggaagacgtctcatttgccaaggagagctggagtcagtgcttttggtatagggggagcaaatgctcatgtcatcttagaagaggcgaagccgagaaaagcaaacggcacggcctcgtccaaagaattaattgtgctttcagctagatcaacgcatgatatgaagaacatgacaaaaaacttgaaggaatatgtctcctcacatcatgaactctcacttggccaagcagcttacaccttacaaagtggaagaaaagccttcaaatatcgaaaaacgtttgtctgttcgtcgcgggatgaattattagagcaactgcaagtgcaagatacagcagggagagaaagtcttctttataaacggatcagcatgaggctgacggggtatcatgagtcaggtttacgtgattacatcaagctgtatgagaaagatcattctttcaaaacagaagtggatcgattaatgagcctcgtccaatctgcggtacctatcaaaaaagacgagctgttccattccaaacaaagcagacaatcagaagtggctatgctgatcatgacatcggcttttgccaacgagctaaggtcactcggaattgaaccagatggttggattggagaaggcagcggagtctggacagctttatatgcagcaggcgggcttgagctaagagacgcagcatcaattgtgtacgaccttcatgacactgagacggttaatcataggctggcttccctgcctcagaggacactccaacagcctgtttacatgcagcaaaccggggaggaactaaccacttaccatccatcgtctgcaaagcgttttcttgatatgaatcagcctgtaaaaccgcctttgattgagcaagaatcaacagccttgatcattgatctttcaataaaacaaagcattgtggttgaaaagggagcagaaaaatcaaccgaatcacttgatggagacattcttcaaatcgccggtgttctttgggaaatgggggtcggcttatcctttcctttaacagaggagaagaacaggcagcgcattccgctacctgggtatccatttcataaaaccgatttttctgcacaaacaaatacgatggcagccattgagccacaaaagccgcaggatgtaaagcgtgtttttacttcgctcgcttctttacaaaaagatattcacgacattgttcaaactcattttggatttgatcaaatggatgatgaatcgccattttttgaatttggtgcgacatcacttgatatatctcagcttgcagcgaaaatatctgagcgaatggatcaacaaattgacactgttcaattgtatcggtttgctacagtggcaagccttgctgaatatttgtttgaagaacagatggaacgagatcaaacacctgcttctctcccagtaaagaacacgtcccaggagcatacggatattgcgattgtcggaatggcaggaagattcccaggggcttcgtcgctagaagacttttggcagcgtcttgtgaatggcgaggaaatgattcactttttcacagaagaagaactcaagaaagcagggctggatgcgtctgtttatcagcatccgaatttcattggagcaaaaggccgtttacaagagatcgaaggctttgatgcagacttcttcaactattctgctagagaggcagagctcatggatccgcagttcaggctcttgcatgaatgtgcttgggaagcgctggaggatgctggctgtgaccctgatcgaatggcagggaaaattggcgtttatacaggaacgagtccaaatcatgagtggctgacgcgctttgcacatcaaatggaagcaaccgagcaattcagcgcaatgctgttaaatgatcgtgaattctttagtacgcagctttcttataaattgaatttacacgggcctagcgtgaccatgcagacagcttgttcgacctcacttgtcaacattggcatggcttgtcaagcattattgaatcaagaatgtgatgcagcactggctggcggtgtgacggtcagttctccagaaaatatcggctacatctatcaagatgggatgattcaatcaaaagatggacattgccgtccgtttgaccaagaggcgagcggaaccattttcggagatggagcggggattgttctgctaaaacgttatgaagatgcgatgagagacggcaacccgattcatgcggtcatcaaaggggttggtgtgaacaatgatggcagccgaaaagctggttttaccgctccgagtgtggaaggacaggcagaggttttaaaagaaacgtatgaaaaatcaggtatcgatcccgcatccattggttatgtagaagcacatggtacggggacaaaaatgggagatccaattgaggtatctgcccttagtcaagtgttcaaagggacagatccgctgacgattccgatcggttctgtgaaaagtaatgtcggccacttaaatagtgcggcagggattgcaggtctgtttaaagccattttggccctccagcataaaacgatcccgccaaccattcattatgaatcacccaatcaggagatccctttcaaagatacaccgttttatgtgaatcaaaaggcgttgtattggaaggaagcagatggcccgagaagagcgggggttagctctttcggtatcggtggaacgaacgcccatatgatcatagaagagggcatacaggcgaagcaaaaaccagcttctaaccaaaagcagctgctcgtcttatcagcaaaaacggatactgctttagcgaaaatgacagagcaattaaagcagtatgtgatccagcaccctcaagttccgcttgaagatattgcttatacattgcggtatggcagaaagcaatttccataccgaaaagccatcgtgctcgcgtctgctgatgaatggatgcagcagaaccagcttgaaacgagtgtgttccgaagcaaaaaatggcgtaaagcgacctttatgttttcaggtcaaggcgctcagtatgctggtatgatgcgcggattatacgatgcagagccagtgttcaaatgggaagtagatagatgctttaaatatgtaatggaaacggagcaagttgatttaaagggctttgttttttccaagaatgaaacgaacgaagacatcacaaaaacgtcaaatgctcagccgcttctctttatatttgagtatgcattagccaaattgcttcagcatagcggtgttgagccagaatcaatgattggacacagtatcggcgaatacgttgctgcttgcttgtcaggggtcttttctctggagtctgcattaacactcgtgatggcaagaggaagattgatgcaagacatggaaaaaggcgccatgcttagtgtgcaattacccgaggcagagctgacttcgatgattgatgaatcgctttctgttgctgctgtcaatgcaaaagacctttgtgtcgtttctggaagagaagagcatatcactgcatttgaaaagaaactgcaagacaaaggaattgtcacaagacagctccatacttctcatgcctttcattcctatatgatggagccgatgcttgaggcgtttcaacaattcgtagagaaagtagaattgcatgagccgacgattccgtttatatcgaatgtgacaggcacttgggcgacaagtgaagaggtgatgacagcatcttattggacgaaccacctgcgtggaaccgttcgttttcatgaaggtctatctcagctgttaaccgatgaagtacgagcgctcattgaagttggacctggaaacagcttgacggcattagcgaaacgtcatgaaaacaaagagtctcatcatgatgttctgaatatggtgaggcatgcaagagaacaagcggatgaccatgcatatttcttaaaaagaataggagagctatgggcaggcggctacgaggtcaaagcgcagcaacatccaactcaagaggaacgtcagctcgtatcgctgccgacctatccattcgagcggaaacgatattggattgaagcaggaaagccggcttctccgcagctatccgctcctaaggaaacgaagaagaaagagatggaagaatggttctacctgccttcatgggagcagcagccgctaaaacctgttttcgaaaaagaaacagaagaacaaacgtggctcattttcagggaacaggatgcttttcatgaactgtttacccattcatttaagcaacaaggtatcaaggtcatttctgtcacaaagggtgaagcttatcaagagcaagatcagtcgtttacgatcaatccggcagaaggccagcactaccgtaacatgctagattcattgtctaatagaggtgtcaatatccatcggattctgcatttatgggaagctgcgaaagaagatgacaactcgaatcgtcaatccgcttttcaggcgcacattgaaaaaggttattacagcttaattttcttatctcaagcgattgctgcccaaaaaaatattcgagaatgccgtctgtttacgatcactagcggaattcagccagtcacaggcaatgagacgatatgtgcagagaaaagtgcaatgcttggaccgtgtaaagtgatttcacaggaataccatcatatcaaatgctggaatatcgatgtggaagatgtgccagaagtcatgtcttggaaggaacaagtacttgtcgatcttattgtgcaggaaatcatgcagcctggaaaggaccagcttgtggcgtatcgcaatcgtcaacgctgggtgcagagctacaaacgtttgccgctgcaaaaagaagatggacttccgaagatgatcaggccaaatggtgtgtatctgatcacaggaggtttaggcggcatcggatttgttctatcaaagatgctggcgaaggaaggaaatgtacatctttatttaactggaagaacggcattgccgccgagagatgaatgggcgtcatacgttcaccaagtaaatgcagatgaagcgcagcgtacgagaattgagaaggtgcttgagctcgaacgattaggtgcaacagtagaagcggtgcaggcgaatgcaggagatctggatcagatgaaacgtgtatttgatgccattcgcaaaaagcatggcggcgttcatggtgtattccatgcggcaggattaccaggaagtacatccttccgtgcaatcaaagatatcccttctacactggcgcagggagaggatcaattccaatcaaaggtgaaagggctcgatgtgctagagcagctgctggaacaagaacaagcagatttttgtcttctcttttcttccattagtgcattgcttgggggcttaggattctccgcttactcagcggctaacttatatatggatgcatttgcagctagacttaatcaacatagtcaaaccccgtggatgtgtgtgaactgggatgcgtggaatttctggggtgagctagaatccacaattggtgaatcgataaatgagcttgcgatattaccagaagagggtgctgagctgttccagtatgttctgtctaaccggcagaatcgacacatgctcgtgtccacgggaaatcttgaagaacgaatggatcaatggctgtcactagagtcgaaggcagcagagaatgaggattcatatgaggtgtctaagcacgaaagaccagagctcggcaatccatatgtggctcctcgaaatgaaactgaaaaagcgatctgtcaagtttggcaggattttatgggcatggaacaagtgggcattcacgacaatttctttgatctcggcgcaagctcgctggatattgttcaagtcaccaatcggttaaatcaagcacttcaaacaaatgaagcggttgtgaccttgtttacgtacccatctgttgctgagcttgcgaaatatatccagccttctgaggactcgcaggaagaagcgatggaagaagaactagccgtcgtcacttcaggtgatcgaagagctcgttttaaacagcaacggaataaaagattgagaggcggaatcgagaatgaatgatacaacgaatcactatcatggcgcagaaattgctgttatcggtcttgcaggtcgttttccaggggccaaaaatgtagaagagtactgggagaatctgaaaaagggaaaagaaaccatctctttttttacagaggaagaattacggcgtgaaggtacagatgaagccttattgaaaaacccccgttttgttaaagcaaaagggatgctagatgatgttgatttatttgatgcggatttctttgactatacaccaaaggaagcggctatgatggatccgcagttcagactgtttcatgaatgtgtgtggacggcgcttgaagacgctgggtacgatccgtttgaatataaagggcaaattggtctttatacaggtgcaggaatcaatacagaatgggtcatgagagcacttcaaggggcggctcaaggtgaggattcgaaaacactggaagctgccgttctgaatatgcgtgattatttggcgacgatgatttcatataaattaaatttgaaggggccgagtatggtggtgcaaaccgcctgttcgacctcgatggtgtcgattcatttagctgttcaggctttattaagcggtgactgtcatatggctgttgcaggcggcgtgtccattcgcctgccgcaaaaatcgggctatctttatcaagaaggcatgatccattcatctgacggacattgccgcgtctttgataacaaggccgatggaaccgtttttggtgatggtgcaggagccgttattttaaaaaatttagaggatgccattgaagacggcgatcacatttatgctgtcattaaaggatcatctattaataatgacggaaatagaaaagtaggatatacagcgccgagtacgaaaggtcaagtatcagcgattaaaacagcacttcgaatggctgaggtggaacctgaaaccatttcgtacattgaagcacatggaaccggaacaaccctcggagatccgatcgaaattgaagcgctcaagcaagcgtttgatacagataaaaaaggcttttgccgcattggttctgtcaaatcaaatgttggtcatttgaatgatgcgtcaggtgtcgccggctttattaaaaccgttttaagcttaaagcatcaagtgattccgccgacgattcattttgaaacgccgaatgaaaaaattgaatttgccaattcgcctttcgttgtaaacacagacttgacgccatggagcaagcatgaatctcctcgccgtgcaggtgtaagctcatttgggattggtggaacaaatgctcatgtcattttagaagaagcacctgctacacgtgtcgccgcagatagccctgaggatagtgaactccttttattatctgccaaaacaccagcagctcttgagaaaatgaccgatcgccttgcggactatttacttcagcatcagcagcatgttcgtctaagtgacgttgcctatacgctgcaaacagggcgccatcatttcccgcataaacgtgtcattcttggaagtaacacggctgacatgttacaggcgctgaatcaaaggtcaaaagaggtggtcaagacggcaagctcccaaacatcgagccggccagtcgtctttcttttcccaggtcaaggatctcagtatgtagacatggggcgtcagctttatgacaaatatccagtctttaaggaagcgctggatcaatgcttgaatcaattcaaacagcatatctcagttgacccattcagcattttattctcaacagaagcaagtgatgatcctcagctgatcaaccaaacagaatatacgcagccgcttctgtttagtgtggaatacgctttggctaaattgctgattcattttggcgtcaaaccgcaggcactgatcggccacagtattggagaatacacagctgctgccgtatctggtttactatctgttgaagatgccgtagatcttgtgtcttatcgcggacagctcattagcaagctttcaaaaggctctatgctgagcgttcctttgagtgaacagaacgtgctgccatatttaacagatgatctttcacttgcagctgtaaatggtcctgagttatgtgtagtgtcaggggagaccgcagccattgatgcacttactgagaagctggaggctgctggacatgggtgcaggaagcttcacacctctcatgccttccattctaaaatgatggatgacatcctgccatcattcaaagaaaaggtagctgagtatcaattgaatgcaccgtctatcccgtatatttctaacgtcacaggtacgtggattgaccatgaagcagtgcaagacccggcatattgggctgatcacttgcggcaagcggtccgtttccgtgatggagcggagacattattaacggagcttgatcctattttcgttgaagtcgggccggggaatacgttaagtgcctttattcgccaagcctcaaaggaacaccatcagcagccgattccattgatgcgtcacccgaaagaagaggcagcagacgaccgctacctgctgggcaggcttggtgacatctggcttcaaggggtgccggttgactggacaaaatggcgaaatcagacatcaaatcaaaaagtatccttgccgacctatccatttgaacgacaaagatattggattgaaaaggtagatacatccgcattatcttcatcctcaggtgtgcaaatggtggtgccgaaggaaaacaaggcacagggaatagaaaaaaacaatcaagtccattccgccgcagcgaatgatattgaggcaacgttacagcggatgtggaaagacattttaggaattgaaaaggtggaaagagacgaccacttctttgagcttggcggacattcgttaaatgcgaccggtctgatttctcaaattcacaaagagtttggtgtagaacttacgctcacagacatgttcaacaatccgacgattgaaaagctccaagcattcatcgaaaaggcagagaagcatcaatatttcaagattgaaccagtggaaaagaaagacacgtatccattatctgctgctcaaagacggacattcctcattcatcagcgtattggtcaagtgacctcatacaacatgccgatggcactaagatgtaaaggtgaaattgacgtcgagcgctttgagcagaccttcaagcaattaattgatcgtcatgaaacattgcgaacgacctttgaattaaaagatggagaaccggttcagcgggtccatgatgatttccagtttgctgttgaaataacagaggctgatgaagaaggattagaagcacaaatcgatgaattcattcgtccatttgacttaaaggctgcaccattgatccgtgtgcgttttgtgaaaatcgcagcacatgatcatctcttattagtcgatatgcataatattgtggcggatggagcgagcatgaacatctttattaaagaatttactgagctctatcgaggggaaaccttgccggaactgaccgttcaatataaagattatgcagaatggcaagacaaatatttccgcagcgagatgtttcaaaagcaacaggattattggaagcagcaaattggctcaaatgtgccaactttgacaatgccatatgattttgaacggaaggaacaatccttcttaggaagagcgattaaatttaatattgaaccgcacatcgttgagaaaattgaacagctcgctgaacggtatcaactgacaaataacgtcatcttgttccaactctatgggctgctgctctcacgttatgcggatcaggaggaattgattgtcggttcacttgtggctggacgacgtcatgcagatatcgagcatacaattggcatgtttacgaacttcctgccaattaaactagacatggtacaagaagcaacctttacagagcaattggcgcagacaaagcaagtactgctggatgcgtatgaccatcaagagtacccatttgaccaaatggttgagcatctgaatccaaaaacaagaccgcatcgcaatccattctttgatacgatgctcatctatcataatgagtacgatccgaatattaaaattgaagccgatggactgacatttgaaactcatgagtttgcaaagggaatttccaaactcgatatgaaaatggatgttgtcagagaggtaacgggcgagttaaagtgcgtgcttcaatacaatctagctctgtttaaacatgagacgatgcaagctttcgtcaaccacttccagcacttggtcgaacaggctgttcaaacacctgatcaactgctcaaggatttcgctgttctttcacaggaagaagaacaagcagcaaaagaaaaaagggagcgcgcagaggaaaaagcaccgctcgtactgacagtcagctcgacatttacagcagatccagtcgcaccttatattcagtactggaccaagcagtttgatgtgcagctcgatgttcaatttgcaccgtatgggcaggtatatcaggaattactaaatgagagcagccttatttcacagaagaaaaacggtgcgaatcttctgctcattcgtttagaggatatcactggtccagctcatctttcactggaagaaaagaaaaaactggcttcagagcatgctgaagaacttgctaacgttctgaaatcaaaaacgaaacataacctatattttgttgggattctgccgataagtgctgctcttaaagacaccctgcaagacgtggaacaagagtggattgctcagttatctgagataggcggtgttcagttgatcgattgtcgtcagcttgctcagcaatatcagatggatgacatctttgatgaaaaaggagagcaagccgcacacctcccattcactgaagtcttttgtggagctatcggtacaaaagtcgcacgcgagatcattgcatggcaaggtgcaccatttaaggtagcggccattgactgtgatcatacgctttggagaggtgtcgtttcagaagacggtgtggaaggcatcgacattacgccagaacatcaaatgcttcagcgctttttaaaacaaaagcagcaagaggggctcctgcttgtcttaagcagcaggaacaatgaagaagatgtgtggcgcgtgtttgaaaaccacccagatatgatcttgcaaaaagacgatatcgtcgactggcgcatcaattgggaaagtaaaccggcacatctaaaagagatggcagattctctgaacctttcattatctcagtttattttcttagacgatgatccagctcagtgcttgcgtatgaatgaagagctgcctgaagtaatgacgctgctgttacctgccaatgaaaaagcgattccattattcgcccagcatgcttgggcattcgaccgctatgatgtcacagatgaagatagaggacgaacaacgagctacaaggctgaaaaggctcgtcaaaaagagaaagcagagtcgccgtcaatggagcaatttttacaagatttaaatttgaccatgagtgtaacagagtggggagaagagcaccttgcccgcgtggcgcaaatgagcagccgtattaaccaattccgcttaaatgagcagcgctttgatgaacagcagctgagagagcggatggaaaatgagcatgtccagggctgggtcattgaggcagcggatcgcttcagtcatgaagggattgtaggggctatcttggctcatcatgcagacggcaccttgaaaattgatgcatggatgctaagctgccgtgctctagggaaagggattgagcaaaaatgtctgacatggcttgctgaatacagccgtctgcaccagctttcttccattgaatttacgtttgcatcgactggacgtaatgagctgttcaagtcatttatgaaagagcaccagatgcaggaggttgaggagcagcaaacatatcgtatacaagtggaagaaattgattcactgagcaatcacattcagatcgtcgaccacctgtcacctcgtcagcactcgactgaagaaatagaggatcaaagggtggaggcagcaagtcattcagcttctaaaggttatacatgggaaacggttcaaccagatcaaacgctgcacagcggttatgtaaaagcccttaaggtacatgatcaagaaggtcttcgtgcattattaaagacggaactgacacaagatcatggactttacgcacagccaaccaatgaacgcgaggcattgctttttgatatttggtgtgacattcttcatgtggaaaaagtaggaattgacaacgactttttcgatttaggaggaaattctttacttgctgtcaaaatggaagtagagattgaaaagaagggttggtatgttgatgatttgaattttgctgaaaaacacaccattcgagaattagcaaaatatatgaagagggagaatcagcatgcataaagatgtaaaagccatatatgaagaatcaaaaattttagatgaggccactcatttatacggggtccagcgaagtgacatccactttatcgcagatgcagaaaactatgtgtatgaacttaaaaaagacggagagtctttcattttaaaaattacccataccatccgcagatcacctgattatattttaggtgaaatggaatggctccatcacttagcgaagggcggactttcggttgcgaaaccaattgcttcattaaatggccgtgatatcgagcaagtagacgatgggcaaggcggttcatttttgcttcgagtctatgaaaaagcatcaggccataaagtggaagaggcagactggaacgatgaattattttatgcccttggacagtacacagggcgcatgcataaactgacaaaaagctatcagctgtcagacccacgttataaaagacaagagtgggatgaagaggagcagcttaaactgcgtaagtatgtcccagccgatcagactcttgtgtttgaacaagcggatcggttgatggaaaagctggcaatgcttccgaaaaatcaggatacgtacggattggttcatgcggatcttcatcacggaaacttccactgggatcaagggaaaattacgacctttgatttcgatgatatcgggtacaactggtttataaatgacatcagcattttgctatacaatgtcttgtggtaccctgtcattccatacgaagacaaagctgcttttgcaggaaactttatgaagcaattccttaaaggctatcgtgaagagaatgaacttggggatgaatggcttgcctacattcctgacttccttcgcttacgacacatgctgatctatggcttgctgcatcaagcatttgatttggccaccattggagaagaagagaaggccatgctcgctggcttccgctccgacattgagcaagcagcaccgattacgacgtttgactttacaaaactaagtcaatcttaaaatgaaaatccccgcctatatgatgaggcgggggttattttttatgggcgataggtggacggtgattcaataatgtgaaacaggttctttccttgctttgtattatcgatccagccttgaaatgctgctttaccaggtccatatgcatagacagggacatcctcacctgtatgggcaaaggttgtccagcctgagaaagaacgctgatcaaagatatgttgaatgctgagttggatcgtactggccttccctgattgtgccgctttctctacctgtgagatttcctcttttgtgagcgcgaaatcaatattggtgtgaaggacatcacgtacagattgaccccctgcgattttctttgccatatacacaggcgttttcttagcagctagaatgggtgctgggtcccatttatagccggtctcacttgtcataccatctgcgccaaaggaaaatcctccagtcgcatgatctgctgtgatgacgacgagggtttcttgatcctttttagcgaattgaagagccgcatgaactgctttctcaaaatcctccatctcactcattgcgccgaccacatcattttcatgtccagcagaatcaatggtactgccttcaagcagcatgaaaaatccatgcaggttgtcttgatttaattgggttaatgctgcctgcgtcatgtcttttaaagtaggcacatgctttgggcgatcaatggctcgatccagctcgtcctcctggaataagccgagcattttcgaagatgattgagaggttaaatcatcttttgatcgtagaatggaatacccgctcttcttaaattcttgcacaagattacggtcttttcgatcaaaatattgcattccgccacctagaaggatatcaactttgtgctctccgcctattttctcatcaaaaaagtggtctgcaatttgttctttgttttttcgggagacgttatgtgtgccataagcggcaggtgttgcatcggtgatgtcagatgagacaacaaaggctgttttcatttgtgcttcctttgctgcttcaacgacacttctaagaggttctttttcttggttgacggcgatggcatcattgtatgtctttttcccagtcgccatggccgtggctgcggctgctgagtcggtaatattatctcgaggatcatctggatgtgtggtctgcatcccgactaaatacgggtcccagacggtttgtgcttttgtagaaccaagcttttcctgcttgaatgtgcggtaggctttgatcacgggcatccccattccatcgccaacgataaaaataatattttttggtgttttcgtttgtttcttgtctgccgcatttgttgatacgggagtgacatcatgtgaggttaatagaacagctaatacgagtaccgctagaatcccactcataagaaaaatacgatttttacgatccatagagcccatgaaaaatctccttttatcatttatttcataatttgtattttatttgaatgaaggcgatggttcaacccttttcccataaaaaaaggcgatgagacttttatctcaccaccttttataccgtatcacacttcacgccaacgacgccttctagatctttaatatcaaagtacacatcggttgtatagcgatctttatgcacgcgtacgcgtacttccataatcgggtagttcttttctgttaaatcatcaattcgaacagaatgaatgcgaatattgagggctttcatttcttttaaaatatccgtcatgcggtttcgatcagaaagagacattctgatgcggatttctttttcctgtaagcgaatcggcccgatccgctggaagagccatggtagaaattcgacactgatcagaataaagaaaagactgaggaaggcttctttataaaatcctgcacctgttgcaaccccaagtcctgctgctccccagatcatcgcagaagtcgtgagacctgagatgacatcattgctttttcgcagaatcacacctgctccaataaaaccaacaccagatataatttgcgccggtaacctgagtgggtccatttgaagcttagagactcgagggaaattgtaggctgcatcaatgctgatgatggttaatacgcaggagctgacagcaatgacaatacacgtttttaagccgaggggctttttcttcagctctcgttcaagcccgataatcaaaccgattaaggtggccacggctaattttaagaccgtatcccattcaattgtccaaaacatgcgtatcgctccttcacttcatgtacgtttcacatcatgtatatgatcttctcacagcccatatggctgcacaactcttattttattcagaatcagaagaaagaaaagctttttattttatttaaaaagagagtcatccgcataaggcagatgacccttcatgttctttattttgtttcttcttcaagatgattttccattttggtaaaaagcttcttagaagctttagatggtttattggtcaagaggctgacaatgatggcagtcaaaccactcaaaataaatccgggaaccatttcgtacaagccagttgtattattcaagccagttgaaatccatgttaagacaacaactgctcctacaaccattcctgctagtgcaccgtgatggttcatacgcttccaatataggcatagaaggataactggaccaaatgaagatccaaagcctgcccaagcataaccaacaaggtcaagaatggtatcacttggattaagtgaaagacaaagcgcgataatggcaacgactagtacagacatacgtccaatcatcaccagttctttgtctgacgctttccttctaaagaaggtccggtataaatcctctgtcattgcacttgcagtcacgagcagctgtgaagaaatcgaactcataatcgcagctaaaatggcagagagtaaaaatccagtaatatacggatggaataacaccttagaaaacacaataaagatggtttctgggtctgctaaagtggtactagtctcatgtacataagcgacaccgactaatccaacagacagtgaaccaatgacagacacaatcatccagctcataccgatacgacgtgctggctttaaatcttttacggtcgtaatggccataaatcgaacaatgatgtgcggctgtccaaagtaaccaagcccccatgctaagaaggaaataatgccaatgacgctcgttcctctgaatatatcaagcaattttggatcaatttgttgtatatcttgatacgtggcaattggaccacctaattgagtaaaggcaacgatcggcacgagcactaatgctaaaaacataatggccccttgaacaaaatcagttaaactaactgccaaaaagccgccgaataaagtgtataggatcacgatactagaggttaaaattaaaccaaacatataattcgcaccaaacgcagattcgaataaacgtccgccagataccatacctgatgaggtgtacagtgtaaagaaaatcataataatgacagctgagacagcttttaataaagtagaagaatctttaaatcgtttgtcaaaaaagtctggaatggtgatcgcgtcatcagcaacctctgtatacgatcgtaagcgaggagctaagaatagataattcaagtaagccccactaatcaaaccaacagcaagccatcctgacgaaagtcctgttgtatacatcgcgcctggaagtcccataagcatccagccgctcatatctgaagcaccagcagatagagctgtcacgtaaggacccagcccgcgtccgcctaacatataatcattcaagtcatttgtttttctaaatgcataccagccaatggccagcattccaataaaataaatagatagagaaattccaatctcaatactcatgtttccatatcacctttttcgtattaatttgacatcacctcattcaaaatataaaacacagaacatctgatatagctgtctgctcactgctatggttacttaacctatcagagtattcccgactgatcaaccttcttaaacctccttcttacataaaaaaatgcgtgaattattgatgagaatccatatgtaagcgttaccaataatatttaaaagaaaaaattttctgagaaataatcaattcctgatacaaatcattttcatactttctggtttggggtgaatggctaccttctcaagcctgcgtaaagttgctttagaacagtaaaatttgatatgataaagtgtatatgacttatgatcatgaccatgaacacgtatcatttttggaggtgaacctgcatgtctagaatttcaatagaagaagtaaagcacgtggcgcatttggcacggcttgcaatcacagaagaagaagctgaaatgtttactgaacagcttgatagcatcatttcatttgcagagcagttaaacgaggtagatacggaaaacgttgaaccaacaacacacgtattaaaaatgaaaaacgtcatgagagaagatgttccgaataaaggtctttccattgaggcagtcatcaaaaacgcgcctgatcataaagacggctatattcgtgtgccatcaattttggactaaaggaggcctgagacatgtcactgtttgatcacaaaatttctgaattaaaagagcttttacataaaaaggaactgtctgtttctgatttagtggatgagtcttataaacgaatcaatgaagtagacgggaaagtacaagcattccttgcactggacgaagagaaagctcgtgcgtatgcaaaggaattggacgaggcagttggtgaaaaggacgagcttggtctattgttcggtatgccaatcggtgtgaaagataacatcgtcacaaaggatttacgtacaacagcatctagtaaaatcctgcaaaactttgatcctatttatgatgcaacggttgtcaatcgtctgagagatgcggaagcagtcacaatcggtaaattaaatatggacgaatttgcgatgggatcttctacagagaactcaggctacaaagcaacgaaaaacccgtggaatttaaacactgttccaggtggatcaagtggtggctcagcagcttctgttgcagcaggtgaagtaccattctcacttggatcagatacaggcggttcgattcgccagccagcatcattctgcggagttgtgggactgaagccgacatatggccgtgtatctagatacggtttaatcgcatttgcttcatcattagatcaaattgggccgattacgcgtaacgtagaggacaacgcatacgtacttcaagcgattgctggtgtcgatcaaatggacgcaacgagtgcaaatgtcgacgtgccagattttctttcttcattaactggagacatcaaaggcatgaaaattgcagtgccaaaagaataccttggagaaggtgttggcgaggaagcaaaagagtctgttctcaaagcgttaaaagtattagaaggacttggtgcaacatgggaagaagtgtctctgccgcattctaaatatgcgcttgcgacttactacttactgtcttcttcagaagcatctgcgaaccttgcgcgctttgacggcatccgctatggctaccgtacagatcatgccgacaacctgattgatttatataaaaatacacgttcagaaggctttggaaacgaagtgaaacgccgcatcatgcttgggacattcgctcttagctcaggatattatgatgcatactataagaaagcacaaaaagtccgtacattgatcaaaaaagacttcgaagatgtttttgaaaagtatgatgtcattgtagggccaacaacgccaactcctgcatttaacattggagaaaagacaagcgatccactgactatgtacgcgaacgatattttaacgatccctgtgaaccttgcaggcgttccaggaatcagtgtgccttgtggatttgcaaatggtcttccgttaggactgcaaatcatcggcaagcactttgatgaaggaacggtttaccgcgtggctcacgctttcgagcaagcaacagatcatcataaagcaaaacctgaactgtaaggggtgaatcagaatgaactttgaaacggtaattggacttgaagtccacgttgagctaaaaacacaatcgaaaattttctccagctcgccgacaccttttggtgcagctgccaacacgcaaacaagtgtcattgaccttggatatcctggcgtactgcctgtattgaacaaagaagcggtaaactttgcgatgaaagcggccatggcgctgaactgtgagatcgcaacagatacaaaatttgaccgtaaaaactacttctatcctgataacccaaaggcgtatcaaatctctcaatttgataaaccgatcggtgaaaacggctggattgaaattgaagtagaaggcaaaacaaaacgaatcggtattacgcgtctccatttggaagaggatgcaggtaaactgacgcacacaggcgacggatattcactagtcgatttcaaccgtcaaggcacaccgcttgttgaaatcgtatctgagccagacattcgcactccagaagaagcgtatgcttacttagaaaaactaaaatccattattcaatatacaggcgtttctgactgtaagatggaagaaggctcacttcgctgtgatgccaatatttcacttcgtccgatcggccgtgaagagtttggaacgaaaacagagctcaagaacttgaactcgtttgctttcgtacaaaaaggtcttgaattcgaagagaaacgccaagagcaagtattgctatctggtggcttgatcgaacaggaaacgcgccgctatgacgaagcgtctaaaaagacgatccttatgcgtgtcaaagagggctcagatgattaccgctacttcccagaaccagatttggtggagctgtacattgatgacgagtggaaagaacgcgtaagagcatccattccagagcttccagacgagcgccgcaaacgctacatcgatgagcttggacttcctgcatatgatgccatggtgctgacgctgacaaaagaaatgtctgatttctttgaagcaaccatttcagaaggtgcagaagcgaagcaagcttcaaactggctgatgggtgaagtatctgcctacttaaactcagctcaaaaagagctggaagatactaagctaacgccgcaaggcctggctggtatgatcaatctcatcgaaaaaggaacgatttcttctaagattgccaaaaaggtattcaaagagctcattgaaaatggaggagacgcagaaacaatcgtcaaagaaaaaggacttgtccaaatttctgacgaaggtgcactgctcaaacttgtcacagaagcacttgataacaacccgcaatccatcgaagactttaaaaatggaaaagaccgcgcgattggtttcttagtcggacaaatcatgaaagcatcgaagggacaagcaaacccgccgatggtcaacaagattctcctagaagaaatcaaaaaacgctaaatagcaaaaaccgcctcatgagaagaggcggtttttttgcttgaaaggacagggtcttatcatagattcagaccaccgccgtatatcaattcggagattcttttcttataatgaagtataagcgaaagtgcacattcgaagggggataaaggtgaattaatcggaaaaacagcacgtaatattattgaagaaacagcttcaattgttccactacttttaagacagcagggtcctcacacttttctaaattcgtcagcatcccttgaatgactggcttacgaggctcagctttcgccagttcttcttcaataacttcaatggatacaagggtatcatcagaaagcagatgctcaagctttaacaaacgaagctcctcttgaagggaagcagcactcggcgcttcatcgtcccaaatggtctgcttcaggatcggtttcgtctgagaacgaagcaagccttggaccaaatcatcgaatcgttcgagtataaaggaagaaagctcatcaaatgataattgcatctgatcttgtaaaagcaggacctgcacatacgattgaatgattccttgaatcatgactgacaggtcagttatatatggttcgatctcctgtccataagtggtcaagatggaaatttgaatttcatcattcatttgctttttcactgtttttgaatactttttaatttgctggttttctggaataatgttctcgctgaggatcaaaatgataaaatccttgttctcagcaaaatgctgaaactgttcagcgatttgtttctggaagatctttctcggcgcgagatgctgattctcttttcgaatcgtttcaatactttgcatagacgtgtcgatataatattcaaaggctcgattgaaaagctgttcttttgatttgaaatgtaaataaaatgcgccttttgatattccgcactcatctgcaatttcctgaatggtcgtagaagaaaaaccctttttcgcaaacaactggatgcttgctttaatgattttttcttttttttcgttcatgaaataaggccccttcagctttagaatgttacgtcaaacgcaagtgaaatggttgacggcattgtatatcaccgtttattatgatatagaatgaccagtcagtcaatacataaaggaaaatggaggacataatgaattcgatcatcaattttgtattaaagaataagttcgctgtatggctcatgacgattatcgtaacagttgctggtctatatgccggattgaatatgaaacaagaatcaatcccgaatatcaacactccagtcattacggtttctacaacgtatcctggcgcaacgccggacgaagtatcagataaggtgaccgacccaattgagaagtctattcaaaacctcaacggagtcaatgtggtcacatccaattcatttgaaaatgcctcatctattcaagtcgagtacgactataacaaagacatggatgaagcaaagaaggaaattgaagatgcgattagcaatatcaattttccggaaaatgcagaaaaaccaaaaattgcacgctttagcatcaacgcgattccaatcttagcactcagcgtctctggtgataaagaatcactagaagaccttacacagaaagtagaaaacgaccttgttccttctcttgaaggattaaacggtgtctcttctgtcgaagcttcaggacagcaaatcaaagaagtagaattttcttttaaacaaaagaaattgaaagaatacggtttagatgaagaaaccgtccaaaacatgatcaaaggctctgatgtcaacgtaccattaggtctatacacatttggcaacaaacaaaaatcagttgtcgtggacggcaatattttaagcgtcaaagatttgaaaaacatgcgaatccctgtcacaccaagtgcaagcggcggtgcgggaagcgctggagctggggcaccatccagcggcactgaaaacccaggtgcgcaaggtgcagagcagcaggctggaaatgctagtcagcagcaagcagcagctcagcagcaaactggtggaggagcagcaagcggtcaatctgtagagctgccgacgatcaagctttctgaaattgcggatattaaagtagtaaaagatgcagaatcgatctctagaacgaatggaaaagacagcatcggtctgcaaattgtcaaaggctctgatgccaataccgtgagtgtggcagaagaagtgacaaaagagcttgagaaattcaaaaaagacaacaaaggaatcaaagtaagcacgacatatgatcaagcagagccgattaaagagtctgtcagcacaatgctaaacaaggcaatcatcggagcaatctttgcgatcattatcattatgttgttccttcgagatatcaaatcaacattaatttcggtcatctccattccgttatctctgttgattgctgttttattattaaatcagttggatattacattaaatatcatgacacttggtgccatgaccgtcgccattggacgtgtggtcgatgactcgattgtggtcatagaaaatatctatcgacgaatggcgttaaaggatgaaccgttaaaaggcaaagcactcgtcagagaagccacaaaagaaatgtttatcccgatcatgtcttcgacaattgtgacgattgcggtattcttaccgttagcattagtaggtggaatgattggtgaactattcatcccatttgccctaacgattgtgtttgctttacttgcttcactgcttgtcgccattacgattgttccaatgatggcacacagtctatttaaaaaggacctgtacggcacagcgaaaaaagtaaaagagcataaaccaagcaagcttgctggcggttatagacgtgtactcaattggacactgaaccataaatggatcacatcaggaattgccattcttatgctcgtcggaagcttattcttagcaccacttgtcggtgtcagcttcttaccacagcaagcagataagacggcgatggtaacatatacacctgaacctggacaaacgagagaacaagcaatcgatgaaacgaaaaaagcagaagaatacttgatcaaacgtgaccatgtcaatactgttcaatattcactaggttcttcaaatgcgcttacagcaagtgtaggcggcaactcgaacggtgcgttattcttcgtacaatatgatgaagacacgccaaactttgataaagaaaaagataaagtggtcaaagccctgcaagacaaaacgtctaaaggggaatggaaatcacaagacttctcatctgctggcgcaagcaatacagtaacgtactatgtctacggtgacaaagtaagcgatattgaaggcacagtaaaagatgtcgagaacatcttaaaagatgagaaaaacttaaaaaatgtcagcacaagcttatctgagaaatacgatgaatatacgtttaatgcagatcaagaaaaactggcgaagctgggtctaactgcttcacaaatcgctcaagcgattgctcctcaaaatagtgaaacaacactgacgaaagtcacagaggacggcaaagaacttgatgtgaagcttcaaaccgaaaaagacgaatataagagcaaaaaagatttagaaaataaaaagatcacaacaccaacaggacaagaagtccggattggtgatgtcgtaaaagtaaaagatggtacgacagcaaatacggtgacaaaacgtgatggaaaaatctacgcagaagtgtctggtgacatgacaacagacaacgtctcaagtgtgacacaggatgttcagaagaaagtcgacaagcttgatgtgaagtctggcgtaacgattgacacaggcggcgtaagtgcggatattgaggaatcctttacacagcttggacttgcaatgcttgcagcgattgccattgtgtacctcgttctcgtcatcacatttggcggaggtcttgcaccatttgcaattctcttctcacttccatttacgattattggcgcactcgttggattgtttttagcaaaagaaaccatcagcttaaacgctatgattggattgcttatgctgatcggtatcgttgtgacaaatgccattgtgctgattgaccgcgtcattcataaagaaaaagaaggtctttcaacaagagaagctttacttgaagcaggaacaataagattacgtccaatcttaatgactgcacttgcgacgatcggtgcactgctgccactcgcattaggatttgaaggcggaagccagatcgtatcaaaaggacttggcgtgaccgtgatcggcggtttaacaagttctacacttctcacattggtcatcgtcccaatcgtgtatgaaattttaagcaagttcagacgtaagaaaaagtacgctgaagaagaataagagggagccccgctcattggcggggctttcagcgtctagacaaaccctcattccttgtcagtcctgtgctccggtgctcacgaatgttcaattcgctccgctccggtgctcgtccttcctagacttcaaaggttttctatcatgctgaaaaaagacaaaggactaaaataaagatcattttagccctttgtcaataatctggaatccccgctcattagcggggattttttatgttgaaatctgacaaacagcttttctcatgagctcttcaaatgcttggaaaaaggcatcacgatcgacatggtcaatcacttgtattgactttccatctggatgttcttctgtacgtccttgctttggcgtctcggtataaacgatcgcgcccacttcctttgaacgggtaaatgatgaagaagcaagtgtcatcgttgtcagcacgtcccataggtaataggtcgaattcgtttcatgatgaatgagcggtggacaaaaggcgtagcactgaccaataaaatcaattccaatgtgagaacgaagggaagcccagcgctgacgcacatcaagtgtaagcggaacttgattcgtgctttcaagtgcgaccatttcaataggaaagcgttccttgaagacagtgctgacagcataaggatcccaaaatgcattccattctgctgtcccatcatgctcgggttcctcaacattgcctttttcaagaaacgtaccgcccatccacaccaatttttcaattttattagagattgaaggatcttcttctaaggcgcgagcaaggtctgtgagcggacctgtaaagagcagcgtgacaggttctgctgcctttttaacggtttcgattaaatgaaggtgtgctggaagcttggacacttttgtatctacaatgcctttctcgtttagaataggtaaggcatctacataaaaagcatgcatgcgccactctttcggaaaaggattgacgcctctagaatttgaagcagcgatttcaatttcataggggctaaatcgatcaatgattttttgagacgcactgagagcaggctctaaataacaatcagcaggaatcacagacgtcccgatcactttcagatgttccatttgaaggagaagaaataacgagacgaggtcatcaacaccgccatcatgattaaaatagacaggctttttcatcgcataccatcctttagagcgttttcttttatcttatcagaatgctttcttgttgagtgaaatgtgacaggagatttctcatattagctggttgttctgttgccattttcaaatctcatagtataattaaaggttgttagtggtgaaaatagattgcataatgaatataggatgatgatgaatgaaacgtgctcgaattatatacaatccgacatctgggcgtgaactcttcaagaagaatttgccgcaggttttgcaaaaatttgaacaagctggctatgaaacatcttgtcatgcaaccacatgtgcaggagatgcgacacaagcagctgaaaaagctgcacagagagactttgatttaattgtagcagcaggtggagacggcacgatcaatgaagtcgtcaacggactagcaccgcttgaaaaaagaccaaaactaggaatcattcctgttggaacaacaaatgacttcgcaagagcacttggcattccgcgagaaggtgttttaaaagcgacagatgccattattgatggtgtagcgaagccgcttgatatcggtaaagtcaacggccattattttattaatattgcaggcggcggccggttaacagagctcacttatgaagtgcctagtaagctgaagacaatgcttggacagcttgcttattatttaaaaggcatggagatgcttccttctatccgcccgacagaagtcgaaattgaatatgacggcaaattgtttcatggagaaatcatgctgtttcttgtttcactcacaaattcagtaggcggctttgaaaagctagcgccagattccattttagatgatggaatgtttgacctgattattttaaagaaggtcaatttagcagaagccattcgagtagtcagccttgcactgcgaggcgagcatattcatgataacaatgtcatctacgcaaaagcgaatcgcgtgaaggtagatgtaaaagataaaatgcaattaaatttagatggcgaattcggcggcatgctgccaggtgaatttgaaaacctgtatcgtcatatagaatttatagtgccaaaagcaacagctgaaaaaatagggtagagattgaacttggttccttatggcgccaagtttttctttgcaaatgaggtgataaaattggtgaaaatgaaaccgcctgttgaaaagaatgaatactacaatgtaaccttcgaagacttaacgcacgaaggtgcaggtgtagcgaaaattgaagggttccctgtctttgtaccgaatgcccttcctgacgaacaagggaaaatcaaagtcacacgtgtcaaaaaaggatttgcttttggacgactcatggagctgacaaaggaaagtcagcacaggcaagatgcgccatgtcctatctacaagcagtgcggaggctgtcaaattcagcatatgagctatgaaggccagctgctatttaaacagaaacaagtaaaggacgttttagagcgggttggcaagcttgatatgagacgtgtaaaagttcatcctgtactaggcatggaagacccttggaattaccgaaacaaagcacaagttccagttggcgaacgggaaggcggacttgttgcaggattttatcagcagcgtacccatgaaatcatcgatatgaaaaaatgtttgatccagcaatcagaaaatgacgaagtggtacaggcggtaaaagacatatgcaatgcgtttggcattaaagcatataacgaagagcggcacaaaggctggctgcgtcatgtcatggttcgctacggtattgcaacaggtgaaatgatggttgtgtttgtcactagaacggctgactttccgcaaaagcagcaggtgattgagcagattatagcacgcttcccacacgttcgttcaattgtgcaaaacgtgaattcaaagaaaacaaatgtcattttcggagacgaaacgactgttttatggggagaagaatacatttatgacacgattggcgacatcaaatttgccatttcagcccgctcgttttatcaagtgaacccagcccaaacaaaggtactttacgacaaagcccttgaatatgccgagctgcaaggcgaagaaaccgttatcgacgcatactgcggaatcggtacaatttccttatttctcgcacaaaaagcaggcagagtatatggcgtggaaattgtgccagaagcgattgaagatgcaaaacgcaacgctgccttaaacggaatcaacaacgtcgaattcgcagtcggtgaagcagaaaccgtcatcccaaattggtataaagaaggcatcaaagcagacaccctcgtcgtcgatccgccaagaaaaggctgtgacgaagcactgcttgacaccattttaaagatgaaaccaaaccgagttgtgtatgtttcctgtaaccccgggacgcttgctcgtgatttgcgtattcttgaagatggcgggtatgtgacagaggaagtgcaccctgtggatatgtttccgcatacctcacatgtggaatgtgtggcgcaacttattttaaaagaaggcaactaacccgtatgggtgttgccttctttttttctagaaggggattaacaaagttttattgaatatgaaaagtgccacttgacttacagatgatttactcgaccatagaatgtagaatttgcggcgctagttctttaaaattacgactgagttgaatttataatctatataaatttttgcaagtgcattttgtcacattggtggaaattcccaacaagttcagtttctgaattgaaatttcctcaacctctttgtcggtaactcccggtattcactcaggcatttcataaaaaattcattttaattttttgatataatagaaatatgaataaaatgtaaaattggcaattaaaaggataatagtgaggtctgttattgtattataagaaaaatcatgggaatcgattaggggaggaacaatagtgagcattttagcgtacatagctggaactttgatagccccaaactttgccggttatcttttgtcaaaaggtttaacaaatcaaaaagaaaagagattaattaaagacatagaagatacagttactgaatttaatcgtaagtttgataatactgaggttgatagtaactattttatagaatttcttgaacagagcaagactgttgaaacaataatacaaagagtattttatgcatataacactacaaaggaagattaccaagatatatttaagaaactagcaaaagaagcggtcgaatttgtcaatattaaaaaagatgaatttaagcatacacccattaagaaaccaagcgattttgaagagtacttctctgagttatttgaaatactagtaaattttcgagaatcgttattagatattaaagacaaggtaattgtatcaaaggttgatgagtcaattggtaaatcagaaagggaaattatcagagctattgaggagataaaggccgattatttgttaggaaggaataaacaccttttgtctaatgaacaaatcaagcccaggatagaggagttgaatcacgaatataaatcagcttttattccgttgggcaatagtcttataaagagaaaagaattttctatatgtagggaagcattagattcagagaaatctttaataatacatggaaaggctggaagagggaaaagtggatgtacagaagatgttatcaattattgtgaagaaaatcagataccatatttggcaattaaattagataaacgagttcccagtatgactgccgagaagtggggagaagatttaggattacctgcatcaatcactcattgtattcacagtgtttctaaaaataaaagggcagtaattattttggatcagttggatgccctacgctggactctggcgcattctagagatgctttattagtatgctctcagattattaatcaagtagagacattgaataatgatagaaaaaacaagatatctattgtttttgtgtgtcgaactcatgatttagaaaacgataataacattagagcattatttaaaaaagatgtttcaaaagaggacgttattcaatgggatagggttcaggttaatgagttggacgaggaattagttgagggtattgttggaaagcgttatgagcaactaacaagtaaactgaaagagatactaagaattccaagcaatttatatatttggaaacagctagaccctggcaaagtatatgcagaatgttctaccgcaagccatttgatatcagaatggtggggacagctctccgaaaaatgttttgagtttggattgagagaagacaatctaaatcagattaaagataagatggtaacttttttagaaaagtctagtagaatatttattcctttaagtatattaaacgaaaataaatcaaccttagaatttttatcttcaaatgctttcttaataattcaagatagaaaagtttcattcgctcatcagtctatattagactgttttttagcagataagatgcttcatagatattatgatggtgaagatatcgtagatataattggggctaaagataaacaaacacctggtaaaagatatcaagtgcaaatgtttatgcaaaatttatttgaaattgatagccatgattttattactgttggacaaaaaatgtttgaagcaaaacaaatcaggtattttgtcaaatttgttttctttgaggtgctaaatcagatagataaaatagatgaaaatatacaaaactttatagtgaataactgtgaaaatgaaagttacggcaatcacattattaataacgttatattctcaaagcccaattatattaagttacttagacaatgtggcattttagagaagtggtttaacaccccatctaagaaagatatggttatcaatttctttgtaagtataagcccaaattttgaggctgaggatattacgtttattgaaaaatattcatttaattcacaggaagacgataataaattctctaaatgttttttgcgagatataaatcaggatacggatgagttatttgaattaagaatgaaattttataagcgatatccgcgaatggctgataactattttgattttaagtcgatgcttaaaaatagtgaattaagaacaatacggctattagcttttttattggaaaataaaattaaaagcaaggggaaacaaatttattattacgaagaaacatttctctatgaagactctgaaattctaatcaataatggagaagaggttcttaatttattattaccactcgttccaatagataaagacgtaagctttatttatagtgattggtctgggaaatatattcataaaagagggctagaaagggcttgtattcaaattataaagaaagcgaatgcagcaataatttctcaacaaccgaaaaaattttttgatcgctataaagaattcacgggaaaaggtaatgatttatttaatgaaattatattggatggattattcagagtgtcagaaagttatagcgatgttgtaattaattatttatgcagtgatttaaacagtaacgtattcgataatacaagtggcaatggtgataaattacttcttgccaaacaaatattagaaaaacatacgagatactgtagtgaggatattttcaatttattagaagagagagttctaagttatctttctccgcaagctaaagacgtatatcgtcgtagaattaattataatagagaaaaaaatggtcgtacagtttattggagtttttggggtgatttccaaaaagaaattctagaaattcttccctataatcgtttaagtattcaagcaaaggatttgctgcgtgttttaagacgtaaattccctaaagggtcaactttatataaatatacagatgggcacagcggatcgataagctcacccgtggcggggaaaaaattaaataacaaaaagtggatagagattttaactaataaaaaacttattcaaaaagattcttccagatggatagaggttccagaaggttttattagttcttctattgaagaatttgcaagtagttttagtaaagctgtttccgaggaacctgaaagaatgataaatctagttctttcaaataaagagaaagttctggaagcatacgtagattccttatttagtggcgttgcatctagtaaggcattgggggatgtgccggtagagttattggaaaaaatgattttgacctatccatatgattatacctcatatcgggcgaacgatatttgctcaatcattagagacaggaaaaacgtaaattggtctcaggagattttggatattctaaaggatattgcgatcaaccataataacccagaattaggaattgtaaatgtaactaataatgaggataaagaaatgcgtagctatgccatgctacaaagtaatgcgattaactgtgtaaggggtaacgcagctcaagcaatagctgagttattatggaatgaaagaactttgtttaaacagtttaaagatacaattgaaagattggtatttgatgaaaatccggcagtgaatttagctagtttattcgcattatggcccgcatataatattgatagggagtgggcatcagggataatattaattcaatttagtaaagattacaggctagcgggtttttatgatacgaaaaatatgttctttttactttatcctaaatatcgtgaacaagtactgaaaactattaaaaaatgctacgaatccgaagataaagacctaattgaaatgggtgcaaattgtctttcagaaatgtttattcgtaataatgaattttccgaaataattaataacgtagatgcaatgagtgaagcacaagcaaaagtcatacttcatatggctactaattattttaacaaaggtgaatttaattcaatagtaaaagatttaatacgtaaatttaaggcaagtgcattagatctcgagatgccaatttcacgattattttatgatgatctcattgatttaaagagagataaggattttctgattgaaataatgaattctggtttaaaccgtagaatagtacatgcttttgttcattatcttgaagaaaaatcaaaatcaatagttgattacaaagatattatattttcaatgagttaccacttacttggaaacgaagttggtaagtttgaagagatttggggaatagaagatgaaatttctaaattgattattggattatatgacgaaacctctaactcaactatccctgagataaaagatattgcaaatgaatgtcttgatatatgggatttgatgttcgaaaagcaatttggtcaaattagatccttgagccaaaaactaatggaaaggtaagccggttgttgcataaccactttgtacatcacttttacacctttagaccttttaagtaactaacagatatcttttgtaatctatattcgcacatttatgttaactggataaatctatataaaaataaccccctatctaggaagggggttattcttctatgttatgattcttttgatcaagcgcagaggatataatatcaagtccgatgtataaaaagctaacaaagaaagataaaatcaatacaccatttccccatatagaaacttcaattttctccaaatttagtacatatttaatcgtgaagtaaataagagcccacgaagcaaaaaattctaaaatataagttatccatattgggaccttcaacaaaaaaatgattcctttccctataaataaaactataaatgaccaaaaaatcacgatgatgctgactaacaatgaaaaggtaatcaaagagaaaaatgaatcataagtgatgtattcaccgaaaagaaaattcactcccaatgagactagataaagcataacagttggaagggcaataatgaaacttagggaaaaaaatattagtaaaataagaagaacggcagcaatagcgccaggggcttcatctacaacgtttttctttcttaaaaaagtatagagtatgatagacactaaaaggagtattaaaaaagtcaatgaaatcacgtaagaaaaagacatgaatacctccataaaaaagcgctattagaaactaatagcacttattgtttatttaaacaagattaataatgaattttgccaaagttttagtaacatctctaggagagcctatttaagcattagtgaactgtttttctgtccacttttcccctttatccattacttttgcgatttggcagaattctttctgatctaagcagcaacttttaagaaaaaccagtgaaatatttctaaaattcgtataggtcttttaagaaaatcactcttattatgcaatacacaaaaattgtaacaaaaaccatattaagaatgaattgtatcttagtactgtattttatataacgtgatatattttgaatagagaatatctaaagttgaaaaagttaagtatcagtttaacaattttttctgtgttattcgctgccggttggtcgcttgataaaatcattacttctaatacttatcatgtaacagaaaaggcaattacaatttaaaaagcccctgcatagggctttttttatttgaatatcttttttattagtttgccagatgcattacctgctgcccgtcgcatgacacgttttccagtagtacctttttgaacggcgtttacgtcttctcaaatttttgatattttataaagtgctgatagcattttgttaatgttcattttatgctccttttgcgttgaatccttactaaagtatataatgataaaaattactgaaagattttatagaagaaacatgccctttaaggcgctatgtcatgagaggaattggatgaaagatgagtaaaaatttctggcgtgatttaccacggccattttttatattagcaccaatggaagaagtgacagatgttgtgtttcgtcatgttgtgagtgaggcggcgagacctgatgtgttttttacagagttcacgaacagcgagagctattgccatccggatgggattcaaagtgtgaaggggcgtttaacctttacagaggatgaacagccgattgttgctcatatttggggagacaagcctgagaactttagacaaatgagcattggaatggcggagttaggatttcaggggcttgatattaatatgggctgtcctgtcccgaatgtcacacaaaatgggaagggcagtggattgattctacgcccagatgttgcggcagagctgattcaagcggcaaaagctgggggactgcctgtcagtgtgaaaacaagacttggttttacagaaatcgatgaatggcgcgattggcttagacacattttggagcaagacattgtgaacttatcgatccatcttcgtactagaaaggaaatgagccaggtggatgcgcattgggagcttattcctgagattataaaactgcgtgatgaagtagcacctgatactcttttgaccatcaatggtgatattcctgatcgtcaaacgggcttaaagctcgctgagcagtatggagtggacggagtgatgattgggcgcgggattttccataatccatttgcctttgaaaaagaacagaaggagcatacgagtgatgagctgctaggccttttaaggttgcatcttgatctacatgatcaatattcatcactaggcttgcgtccattcaaggcactgcaccgtttctttaagatttatgtgaaaggattcagaggagcgagtttcctaagaaatcaattaatgaacacatcatcaacagatgaagtgcgtgcaatgctggatgaatttgaagcgagaaataaagaacaataacgattgaaaagaggaggagaagcccttctcttttttctatgaataggactattaaactagtcgtctcaaatggtaagataagatagaaataacaattggaggtattttatttgaaatcattttgggataaagacagagaaagtgaagagacatttaagaaaatcaatgagaaaggaattgcaaaagcggaaaagaagctaggcgtcatcctgcctgatacatataagaaacttattcttgaacaaaatggcggttataccttgcataatgcttttccaacggaccagccgaatggatgggcagaggatcatgtgtcatttgatcatttaagaggaattgctaaaaatgaaggcattatggatagtgattatttaatagaagaatgggaattgcctgagggacttgtgctgatttgtggggatggtcatacgtggattgcattggattacagagaaacaaaggagcatccgccaattcattactttgatctagaatatgagacggatttcaaattagcggattcgtttgatgaactgcttgctgggcattatactgctgaataacattgagcagtcatcacttatttcagaaaaatattttggtgttttttgagagagacaaaagtgtctctcttttttatgaagcaaaatgaattatttcaccacttcactccaaaactgtacctgttatttttaagtcctattattcaattggttccttttccactcactaaattttctgacgataatatctaccacaatgtaaaatggcagaaagcttgagttgtccactttgttatacaaaggaaacggggtgctgcttacatagatgttaaacatggcattttgtgcaaggaggttattcctcaatgtggtcatgctgataaatttgatatgtctcgttttcaccaattgaatgatttgatctaaattcttcgattcgcctgataaagaaatgataaataaaaggtcatcctcaccaaattcaacgattccatctgttaagtctcgcttacttcgtaaaacttgagatttcttatgcagtgaccataactgtcgttgtacatcattggccaaatcgagctgagctgttcctgtaccataaatataaatatacggtgcgcgatcaatcagttgatttaattgatgaaagtccagctgctccatatatttccttgtctgctggatatcttgatcgagcagcttcattaaatcttgtgttgtttcttcagtatgattattcaatttcacataagactttaagtcactgtagccgtcgaagcctattttcttggcaagccgatggatggatgagatggaagtatgagcataatgagcaagatcctgaattttcattgtcttcatttcttcaaggtgatcgtgaatcgttttaataatgtgcagatcattcttatttaaatcttcgaagtattcatttaccaacttgtccaatatcatgcgatgtgccctccaacatgaaaatattttcttcctgtgaaaatataatctaatgttacaacttgatttctaaatacgtcaaatctattggtttttgaaagcgctacctttacagtggtcttatggatcaaacaaaggggttatgcttatgaatgcaatcaagcgatttggtagtgctatggtagttcctgtacttttattcgcattttttggtattgttgtaggccttgcgactttatgtaagaatccagcgattatgggggaaatggctgcagaagatacgatgtggtataaggtttgggcactgattgaaagcgggggatggacgattttcaatcatatggagctggcatttgtgattggcttgcccatctctcttgcaaaaaaagcgcaagcacgtgctacgctcgcagctttgatgatttatcttgtgtttaacaattatattcatgctattttgacactttggccgtccacttttggtgttgatttatcgcaaggtgtcgagaatgtagcgggtgtaaaagaaattgcgggtatacctacgctcgatacaagtatcattggtgcggttatgatatctggaatcgtgatttggatccataatcgtttttatgatcaaaagctgcctgaaatgctcgggattttccaggggcttgtatttgttgtcatcatcggattctttgtgatgattcctattgcttttatcgttgcttttgtatggccctatgttcagcaagggattcaatctctccaagggttcatgtcacactctggatatattggtgtctggctgtttcatttcttggaaagggtgttaattccaacaggacttcaccattttatttatacaccttttgagtttggtccagcggctgtaaatggggggttaaaaccatattggattgctcacttaaatgaatttgcgacctcaacttccgatttgaaaaatctttatccatacggatttttactgcatggaaatattaagatgttcggctgtttagggatagctctagcgatgtatttttctaccccgaatgaaaatagaaaaaaggttttggcattggtgttacccgccacattaacagcaatatttgccggaattacagaaccacttgaatttacatttctatttctcgcaccttatttatttgtgatacatgcacttcttggagcgaccatggtgacaatcatgaatatgtttggtgttgtcggaatgatgggttccgggcttattgagatagctgcattgaactggattccgctctcttcaaatcatggaggagtttatctgctccaagtgatgattggatgtctatttacagcattgtattttgtcatatttagatggatgattgtgaaatttgatattccattaccaggacgaaaacatgaggaggagacgaggctatttacaaaacaagattatgagaatgctaataaaaagggtcatgacaaaaaggaagcgcccgtttatgcgtctgagtatgaagagaaagcagtttatttcttagaaggccttggcggtaaagaaaacattaaagatgtgacaaactgtgccacgcgtctgcgtattacagtgtttgaccctagcttggtgaaagatagggaatactttacaaaaaataaacgggcacacggaatggctaagagtggtcaaagcattcaaatcattgttggcttaagtgtaccgcaagtgagagagtcgtttgagacaaaactttcattagattgaaaaaggagctggatatcatgaaaaaaacatttaatattaccattgctggaggcggaagtacatttacaccagggatcattttgatgctgttagactatctagaggagttcccaattcatacaattaaactctatgataatgatgaagctagacaaaaaacgattgcagatgcatgtgagattatgttaaaagaacgagcaccagaagtgcgattactggcaagcacggacccagaagaagcctttactcaagtcgattttgtgatggcacatattcgtgtcggcaaatatgcaatgcgtgaattagatgagaaaattccattgaagcatggagtcgtcgggcaggaaacatgcggaccaggcgggatagcttacggaatgcggtccattccaggtgtattagaacttgtcgattatatggaaaaatactcacctgaagcttggatgttaaactattctaaccctgctgcgatagtagcagaggcaacacgtaagctaagaccgaattctaagattttaaacatatgtgatatgccaattggcatcgaagaattaattgcaaagaatttaggcttatcttcacggaaagaactagaagtcgattactatggtttaaatcattttggctggtggacagatattcgagataaaactggaaatagcttaatgcctgaggtgattaagcatgtaagccagcatggttatgcaacagatggaacatctgaattagaacagcagaagagctggaacagcacattaaaaaaggccaaagatattcaagcacttgatccaaaaacggtaccgaatacgtatttgaaatactatctatttcccgatgaagaagtggcacattcaaacatagcgttcacacgtgccaatgaagtgatggaggggcgggaagcttttgtttttagtgaatgtcaggccattattgataaaggaactgcaaaggaaacaaagctgaccattgatgagcacgcttcctatatcgttgatttggcaagagctattgcttttaataaaaaggaacggatgctgatgattgtagagaacaatggcgccattaggaactttgatccaacagccatggtcgaaattccttgtattgttgggagcagcggtccagaaaaattagtagttggagagattccaagattccaaaaaagtctcatggagcagcaagttggcgtagaaaaactagtagtagaagcatttgaagaagggtcctatcaaaaactatggcaggctatcacattatcgaaaacggtgccgagtgctaaagtagcaaaagatattttagacgacttaattgtggcaaatcaagcattttggccagagttaacataacaaaagaataagcaatatgggcgtcacagcgctcatattgcttatttgtttttttaaccgatgtattgtgatggagaggaagaggcccccttactctgcactttcctcaacctcactgctatcctctgtttcaccaatataaatagggccgtttgcgtggtcgagtcggattggccattcgtatggaacttgaagtcgtctagcaatggctctccagaattttgttgaatccaattcgaattcttggaagtcttttaataagtctttgtaagacgagccatcaaattgaatgaacatatcttgaaggcgcatgaacgcgacatgtctcacttctaatgctgccgcagcttccatttcttcttctgttgcttctccaatgattgttcctgcgggcggaagcatgtcgtatacgttaaattcctcttcttcttcgtgtgctgcaatgtgctgttgatctgacatttctcttcactccttctagtcttcatcaaaattttattcgtgcttacctctattatcggaaggaaatgcgaaatgtggaatgaaaaaagaagcagatccacaacacttgctttttcttcttgaatcttttatgatcaattacagatataaaaggtctataatagatagaaaggaaatcatctgatgaaatattctaaagcaaccaactatgcacttcatacgatggtatttttaactcttgcaccaaaggggaaagcaataggcgttgagcctctcgccaagatgcaagacctttcacccacctatttatccaaaattttaacaaagcttgtgaaggcaggattgattgaatcaacacctggcgcaaaaggtggttacaccattatgaaaaagaaggaggacatttcatttttagacgtcattcaggcggtagaaggtcaaactaatttatttcgttgttccttagaacatgattctttcatgcctcatgatgactgtttgattgaacaggtcatgcaggatgttgaaacgaaaatgcaggagacgttaagtcaaaagcggttagttgatatcgcaagccaaattgagcagacaaaaaaagatccatttttcaacatgtgatttttttgaaccaattatagatattaagagtctttaaagtcttgaataaaaaggagagatttacatgttattagattgtgccattatcggaggagggccagccggattaagcgcagcacttgttgtggggcggggcagaaaacaggtcattgtattcgatgacgagatgccaagaaatcgagtgactcaggaatcacatggatttattacaaacgatggaatgacaccgtttgagatcagacaagcgggagaagcagatcttcaaaactaccccaatatccaaatcaaacgaagtagaatggtcgagatacaaaacaatgaggacaactttgcgttactgacacaagagggagaaaggttcgaagcgaagaaaatcatattggcaacagggctaaaggatatactgccagagatcaaggggattcatgaagtgtatggaaagacgttgtttagctgtcctttctgcgatggctgggagctaaaggacaagccgcttgctctcattgctgagaatccacgcgccttgcatatggctaaacttctttccaattggacaaaggatttgatcgtgtttacgaatgggcagcaagtgtttgctgaagaggagaaggcattgctatcagcacattttattcaagtcattgatgtaccgattatgtccattcatcatgagaatggacaaatgcactctcttcaccttgcgaatggggaaacggtgaaaagagaaggcggatttgtcgcaagtgaatgtaagcagtcagctccatttgctgaaagtctgggctgtcaaatgacgaaaaatagcggtattgaaacagatattcttggacgtacaaccgtcagcggtgtctttgcatgcggtgacaatttaggcggccctgctcaacttgttcttgccgcagctgctggtagccaagcaggaatgggcgtcatccatgaacttgtgcaagaagaatttcaacaaaaaacatctctataaaaagagatgttcagcgatgaacggttttccatttagttaagacgtgagcaatccattcgaaaagagcgtaaatcacaaagaaaataagaatccagctgctgacatctacccagacattggaaagatgaatgacatttacctgatcaagtccagcctgtatccacatagtgatcaatgcggtgaggaacacctgtaaaaaccattttttcaattggttacacctccatctctttctatcatataagaaatgacagtttatttccaattgtatttccatcagtttcaacggtaaaataagaaataaaaccaatgaaaggacatgaaatgagcgatcaaaccactagtttttttaaaagtcattttcctgatcttgtcctcacgccgcctcttttttatgaatggccttttgggcttcgctttgaagtggcagattggtcattaggagaaaaatcagttgtattagaaaaagcaggggatcgtgctttgaaaattgtcagatatgcttttgatccagaagacgatattctatttgtcacggatgtctatacgcagcatgaacatgaattaatgaagcaaaagctcctagtctatcaaaaatatgtccgccagcaagtacgcaatcgattgcgtcacgagcttttgacctatgttagaccagaactagatgagccactgacattggagagatttaccttaacttgtcagctgcaagatatccgattacgcccacttctacaagccatatgccaagaggatttctatgcaccgaatcaaattatgaacgggaagcttggttatgaaatttatctcatcaatctcacaaaacagatgattttccacttatatgatgatcgaggctgtgatcttattgcggcagatgctgagcgtcttcggccagtctatgagggcttacagcactggctattagactatgatcttgctcagatggacaggctttttgcagtgaaataagaaaaccgcacttttgacaagtgcggttctgttttatgcttctactttattgaagaattgtggtaaatattctttgtgtgcttctagcatctcatctaggatgctttttgcaatcgcatcagatgggactagcgggttgatcgtcattgcgacaagtgctgtgttgtaatcgcctgtcacggctgcttcagcggcaacacgttcaaaggatttaatttgagaaatcagtcctttgactgcgactggcatttccccaacagcgattggtttaggaccgtcttttgtgatgacacagttcagttcaacggcagaatcatttggaatgtcactgatggcaccattgttgatggtgttcaccggctgaatgtcgtgcttgtcgttataaatggatgcaatcaagttacaagccgcatcactgtagtaagcaccgcctcgtttttcaagctgtggcggcttgatatcaagatcaggatctttgtaaagctcgaacaggtcattttctagtgcacgaacgacttctgcacgagttccttcattctctgctgctttcttttcttcagccagcatatcacttgttttgtagtagtagcggtgatatggacatggaatgacgccaagcccttttaagaaatctgcattccacggaatggcttgaatgttgttcatcgacatgctggagtttggatctgccatgtcttcgatgacttgatccatgatgcttttgccatctaagaatacattgagtccaaagaccatatggtttaatccagcaaagctgacttcgactctgcttgcgtctacatcaagtcctttggcgattcccatgcgaataccgattggcacgttgcataagccaacgactttgcgatggtttgaatagcgaagaacggcttctgtgaccataccagctgggttggtgaaattcacaagccatgcgtctgggcacagttcttcaatatctttgacaatatcaagaatgactggaatggtgcgaagtcctttgaatagacctcctggaccattcgtttcttgaccaatgacatcgtattttaaaggaatgcgttcatccttcatacgtgcttcaagaagtccgacacggaattgtgttgtaacgaaatcagcgcccgcaagcgctttccggcgatctaatgttaaatgaacctcgattggaagtcctgcttttttcaccattcgttttgcaagatttccgacgatttcaagcttttcttttcctgcttcaatatcgacaagccaaagctcgctaatcggaaattcatcgtatcgtttaataaatccttctacaagctctggtgtatagcttgatcctccgccaattgtgacaacctttaatccttttgccatgtgctgcacctccgaataatgtaacgcgcaatgttataatagagaaaagccaattcttttgtctgtacatctatagcttatcgtgagagcatctagtgcgtaaatgacttcagcgtctttaggcaagggtgccctatttagagatttgttacataaaagaaacacattgtgacatgctgttggagaaaggggaagtcagatgttttcaagtgaggtcatttccagctttaatgaactagaaagcgctttataccgatacatcatggaaaacagtgaaaaggttgtgtatatgagaattcgggatttagcagatgctgcccatatttccacctcgtctgtccttcgcttttgccgaaaagtgaattgtgaaggcttttcagagtttaaagtgaaactcaaaatgtatttagaatcagagcaaactcctactttaaaaagcacacagcactttctatatgaatttattgaacgcacactgaaaggggactttgaagggaaaattaaggaggcagcaaggctcattgccgatgcaaaaaatgtgctgtttatcggaactggcagctctggtattttggcacagtatggggcgaggtatttttcgagtcttgagaaattttcattttacatcaatgatccgtttttcccgatgaatatgcagtatttagacaatagtgtcaccattgtgctgtctgtatcaggggagaaccgtattacgattgatcatatttcgaagttaaaaagagaaggaagcaaaatcattagtattacaaacaatcagcactgtacgatttcgcgcatttccgatttaaatattgcttattacgtgacagacgaacgggttcacagagccaatattacgacacagacgccagttgtgtatattttagaagcgatggctcgtgacatgttcgcgatgttaaagaaaaagtaaaagagccgctgcatgaatcagccgctcttttttttctgtctcataaaagcgaggatggcaatccccgaacagatgagcacaaacaaaccgcctagcaaatacacagtcctcgctccgaatgcatctgcaatcaatccaacaaagaaaatagataaaccgacagatacagaagaaaggacgtaatgagccgagtacacctttgataaatctcggacgggcgtttccgtttgaagaatggtttgctgcgaaacatctcgaatttgataagcaggccccatcaaaatgcaaagcagcaaagcaagccacggcaggctattcagtgaaaagacaatagtcagcactgcataaatgaatgaaccagctgccataaagagaagaagctgcttttgaatcaaccggcttatccacgcagccaagagcccgcctagaatggcgcctgtataataagcggcgttgataaaaccccaccattcctcactttcgtttaaatcatgggtgacaaaggcaagggtaatcgccccgatccacacagcgcccgccatattttcacaaacatccataaaggtcagagtgcgaatcgttttatttgtccaaataatcgcccagccatccttgaaactgttcatcttatttgcttttcgaaccgtgtcttcttgcttgagaagaggaaaaacagggatgaaaaacaaataagacaacacaatcatgaaacaagtaatccacattaaataaaaaggaccaatcaacaggacgagcattccagtaaacgaataaccggcgatttgcaccgtttgatgaaaaatggaggctgtactgttcgctttcacaagctgatttgctggcacaagcatcggcatgatggcctgtaataaaggactaatgactccacctgtgatggaaatgagaataagcgcaccaaacagccagaccatatgctgctgaaagaaatgaaattgggctgtaaacacgatgagcatcacaagacgtaaaagcgggacccatttcaacagccggcccgcttgaaagtgatctgccaaaacaggagagatgagcccagctaatagctggcataatgttcttattagcggaaataaagccgcatacgcaacagattgtgtatcttgatagatcacaaacgtgatcgtcatcacaaatagaatatcacttagcatgagaaggcttttactgcctgtataataccaaaacttgtttcccatatccaaccggctccttttcaaaaacaagttcagtatagcatggtgatgaaggacctagaggcttttcattgaaaaatacatcttaaggatgagaggattgtgataagctaaatgaaagacatcgcaaggaaaggggttcaaatcaatgaaagtactaccggcacatgaattcttgaatcagcacagcatcccatatgagatcaaagcattttcttccgaaacagagaagggagcagcaaatgtagcagcagcccttggttttcgtgaaagacaaatgatcaaaacattgatttttgaaacaggggaaggggagcagctgcttgtgatggttggcgcagaccagcatattaaatcagggaaactaaagaaagcggccggctcccgtaatattaaaatggcatcaccagagaaggttctggaagtgacgggctaccgaattggctcgataccgccattttgctggcagccagaaggcttccgcaccatcatcgaagcctcgctattagaggaagaggtattaggcgttggagcaggcgaatggggaaatgaaatcctcatcacaccagaacaattagtgaaagcctcaaaggctgtaccgtatgacattgttcaaccagccgaatagaaaaaaagtgcctgtttcttatgcaggcacttttttaatttgcagcaggcgccttaaatggaccgatatctttcatttgcagaaaggcatccactgttctattttcttcaagatcattcgcccgtttgcagataacaacgggtctgacgatttctatgccttcgatatatacgcgcccaatctctttccgcttgagactgccttgaaccgcatcacggggaacaagtgtgatcccatagccagctttgatcatttgaatcgcttcatgaacaccgctgaattgtaaatcaacagtcggttttttaattcctttcgaggtgaaaagggaaaagagcttatctcttgtggagctgccttcttcacgcattaaaaaaggctccaggctcaggcgctctagcgggacggtttttccgtttaacggatggtctgctggcacaataaaatcatagcttaaattcgtcaaatgggaggtaacgatctcctcatgatccaaatcttcaattacagcgatggccacatctgattcatattgaagcaggctgtctatcacttgagcggagtttccactttttaattcaatttctgtctgtggtgaagacgatttaaaagcagcgagccaatcaggcagtaaaaagttgagtggtacgtaggtagaagcgatgcggaggcgtccctttttcccgttttgtaatagtgtgatctgatattctacttccttttcagcctcgaacacttgccgggcataaggatacagcatctttcccatttctgtgagcgcaattcctcggccgtttcgtttaaaaaggcgaaaaccgatctctcgttcaatgcttctaagctgagccgtcacagctggctgtgtcaaagatagtgcgtctgctgtttgtgtgacgcttttagtctctgcgacctttgcaaaaatccgaagggcatgtaaattcaactttgcaccacctatcaattattttaatggtttaatcaaaaacattcattagatttattataaagcatcccttatcgtaaagatagcgaagggggaagggaaaatggatcatcgtcaaaagcaagttgtgtcaatatcgctcatcacagcatttgcacttattggggattcaatgctctatattgttcttccagtctattggaaagagattggtttatcatctatttgggaggtcgggttactgctgtccatcaaccgattcattcgcattccgctagcgcctgtcgtttggtggctctatcgctatatcccaatgaagaccggtgtattaatggcgattttgatcgcgtcagtgaccacggcattatatgggatgagtggtttttggctgctgctgatctgccgctgcgcatgggggcttgcttggacgttactccgtatgagcggtatgagggttttggctgaaatggacgaaggctcacaaggacatttgacgggtctttataatgggctttaccggcttggcagtttatttggtatgttatttggcgggattttcgccagcttgttcggcttccagtccatgacgcttgtctttggtttactcacattgatagggtgcgttttttatgtatctttggatgaaattgaaaagagagaaggcacgcagatgtatcatggcatcaaacagaagtggtttgcacgagatgttgtaaaagtactgataacaggcatgctggtcgcacttattatacaaggtttattcgcatccacgctgagtcatgtcattgaagcaaagatcgatcaggatgaatttgctctatttggctttgtcatcggagcttcggctttaagcggtgtcattcaagcaatcaggtgggggtgggaaccatttgtcgcactgagaacaggcaaatggtttgatcggcttgtgatgaaggaacgaatgctaagctggatgtttctttcatttggagggctcagttttcttggggtcatgctgaaggtaagcggctggttcctattgatgctgcttttgattcagctgctggcaacgattgtaacaacgttcaccgatacacttgcctttcaaaaagcctctgctcaaacagataagaaccgctttctcgcaagctattcttttgttcaagatatgggtgctgctttagggcctttgtgcggatatacgttgattcagtttttcggaacaaacagtgtcttttggctgatgctcatcataagcttaatgcttgtcagcatgtgggcaagaggcgggcagctgcatgtttcttctcgtgcagtgtaaaaaatgaagcgttatataaaaaaactgcctcatgcagctgatcgcagaggcagtcatattctcttattctatgtctgaatcgtaggctttttgcgtcaggtggctgacaacctcttttaatccatttggtttatggaattcaacaggtgtgcttcctttttcgaagacgatttggtctgcttcaacgagcacgacatatcgattgttgaccttcgcaatatggatcgagtggccaaagtccgcgagaagtcctttgatttctgtttcacctagacgcattttcattgtgatatcaggggtttgttccacaatgtgagaagctgctagtgtgacctgttctgtatcgagtgtttctctaatttctcgtttttcactcgcttcccatatttcaagatcctcttcgaactgctttaattcttcactttcatcctgtaatgtttcaaatacttgttcctgcaccatattcatgacctgtgatttcatgatttcgggcatagattccccgtattcgacgaatttcagaaagtcctcaaaataacgcgcatgtgaggattggtgaattttcacttcagcttcctctgtcatgccctcttctggcataaacggatattgaatcgatttcatattttttgttgtaatggccatttcgacttttttgatcaaggtagatgtatcagcgatagaagccactttctgttcaaaatcgcatttcataataaagacaaaggagtcatcgaagtactttttaggaacggcagacgcaactaaaaaaacgccgcctctgacagcacttgtatctaaatacgtgcgaacaaactgttcgctgcattcattaaatacttcttttgtattggcaaatctcgtctgatgaaataaattgtagtttggatttgaatcgagttcatgaccgggttcgacaatgaatcggccaattttggtcggtacttgttctgatttagggtgtctgtccacttttcgtttgacgattttttttagctcaccatctaaaaagtccttcagctcactttgttcaaattcctcttgatctaatgtttgataatgcttgaaccgtttatttgcttgttcatctttgccttcgatttctacgacaaagaatgatagaaaacgtatcgtaaaatccattgattggtcaccactttttcttcttcggatatgttgagtatagaaaaaggagtgaaaatcgtcaacgaatggagaaatatcgtgtcattatttcccgagaaatgtttagtgaaaaacacttgataataattatcattcttgatagaatgataaaagaaaagaaggaacctgccagttccttcatctcagaaaaacaacttattttgtttcaaatgtttcgcaatcagtttcagcattgcgagtcacatcagtcattgtgtttttaccaattttaatggtagaagctgtacagctgttatcagcccaaaaacggcaagagttcacttcacaaagtacgttttgtgccatgggaattcacctccgtgattcatattgagaatgaagcaagctgccacttgaattcattccatctagtagtctctttataaaaagaggctgtttgtgctgatgatgcacatgtttatcataccatctaccctgataatatacaatttaaactttgaaagagcgagaatacaaatctcgctctttttttatttgtaaaaatagttaaatgctaggtggcaccatctctcatttcgacatatgaatagagtagattcaaaacctgatgtcggacaaagtctgagggtacatgtactgattttccgcataaagataaggttttcaatcaaaaattttcatagagagatgaggggagaagatgaaagcagtcattctctgcggaggaaagggaacgagaatgagtgaggtcacacaagcgcttcctaaaccacttgctatgatcggagatcggcctattctatggcatattatgaaaatctatcagtattacggagtagatgagtttatcttattgcttggatataaaggagagaagatcaaagaatattttctgaactacgactggcggcatcacagcatgcagctggatatggcaacaggagaaatgaagcttttaggaaagttagagaactggaaaatcacctttttagatacgggtgaggagacgatgacaggcggacggttaaagcaggcacaggactacattggggatgagacattcatgatgacgtatggtgatggacttgccaatatcaatatgtttcatctgctgaagcgtcatcaggatcttggggctgctgcgactgtcacaggaattgaaaagaagtcacagtacgggacgttgaaggtatataacgggatggcacaatccttctctgagaagacagacagtatcgggatgatcaatggaggattttttgtgttgtctccaaaggtatttgactatttgacagacgatgatcaatgcgtgtttgaagcggagcctcttcaaaatctggcgaatgatggagagcttgcggtttatgaacaccacggattttggacagcgatcgatacgtataagaacctgaaggaaatcaatggcatgtggacaaatggaaaacaaccatggaaggtttggtgacggcatgagcggattttggaatgggaaaaacgtatttgtgactggatgtacaggactattgggaagctatctcgtcaaggaattgattgatcaaggtgcaaacgtaactggacttgtgcgtgatcaggtgcctcgatcgaatttatatcaaggcagtcaattcgaaaagatgaatgtggtgcaaggtgcattggaggatatgcaaacgattgaacgtgcgttaggagaatacgaaattgatactgtcttccatttggcggcgcaggccattgttggggtcgcaaatagacaccctgtttctacatttgaagccaatattttagggacatggaatgtactggaggcttgcagaagacagccgctgattaaacgagtcatcgttgcatcaagtgacaaagcatacggcgatcaggagcagcttccatacgatgaagatatgccgttaaatgggaaacatccgtatgatgtatcgaagagctgtgcagatttaatttctcacacgtattacaacacatatggtcttccggtttgtattacacgctgcggcaatttatacgggggcggggatttaaatttcaacagaatcattccgcaaaccatccagcttgtgctagaaggaaaggcacctgaaattagaagtgatgggacatttattcgtgattatttctacattgaagatgcggtcaaggcttatttgctgctagctgagaagatggaggaaaaagggctcgctggagaagcttttaattttagtaatgaaattcagctgacggtgcttgagctcgtggataagattttaaaggcaatgggcagtgaactgaagccgcgtattttaaaccaaggaacgcatgagattaagcatcaatatttgtcggcagaaaaggcgagaaagctgcttgattggaagcctgactattccattgatgaaggtttagagaagacgattgaatggtaccgcgaattctttcaaaaatagaggtgtaagtagatgaacagcatatattgtacggttctatcaagtggaagactttatcaagccattgcgtttttcttatcattgaagcaagtagaagatgatgctgtcatcaagacgttatgtatggatgatgctgcatttgatctgcttcatcaaatgaattttcctcatgtcgatcttgttcatgtacgggagctcgaaacgccggagctgctggagaaaaaagaggaacgggatgcctcggaatattgctggacattaaagccgatttggattgagtggttatttgaacaggagcaggcagagggcgtaacctatcttgatgcggatttatttttttatgagagcccgaaagcgatttttcaacatcagccggatgcctctgttttactctcgagaggggatattgtgattccgagcttcgatcctgaggaagtgaagatgcttcagaagcttttaggacgatataactcaggcttcctgtattttaaaggagatgaagccggccggaaatgcctcagctggtggaaagaagaatgcttgaaggaatgcaaaaatgcgccgggagaaggcaagtttggcgatcaaggatatctggatcatatgccgaagctgtttgaaaaagtggaagatattcaaacaaaaggcgtgaatattggtcattggaactatgggcagcattcttatcgggaagagaatggacgtattttgctggacgatgggcatccgctcatttgctatcatttcagcggctttcgcatcgtgagcaaggatgagatgcagcaaattcatgaaaaagggagaaatgatctgccgtttttccaagaagcctatcgaaacgtgctgcgccatgtgattgaatctgttgagaaggtcgatccgctgtttaacggctatgccaaattggagggggatgacgcatgaatgagaagccaaaggtaagcgtcattattccaagctataatgccaaagagcgtttagaagggagtcttttttccttaacgcttcaggatacggatattccatttgaggtgattgtcgctgataatgggtcaacggacggcacgatggaaatgcttgagaacattgaggtgaatttcccgtttaaaaaggtacgtattcctgtcaatcaagggattgccaagggtcgcaatcatgccattcgcgaggcggagggagacctgctgatattccatgacagcgatatgctggcagagccgcaatttattcaaaagcatgcggaggcacatgctgttcatgaggaccttgtgatttgtggtgtatgctggaagcggatttatcgttatttttacgaagcatttgatcaggatcatatcaatcggttgaaaaagcaaggcttgtataagcggaaaatgaaagataaaacgcctcttttatcaatgaaggaagttgaaaatggtggatttctagagaaaagcttcgatttgcagtctgagtttattgatattctcaaagacattttgcgcacgtataactatgatttaggctcttatgagctgccgtggcgattttttattacgaataactcctctgtcaaacgtaagcatgtcatggcactcgggatgtttgatgaaaatatcgttcggtacgggtttgaggattatgatttaggaattcgtctgcatcagcttggtctctcgtttgaattgcgagaggatatcatgagtgtgcatcaggagcatccaagtaatttaacgtcatttgatgacatcaaatataacattttgtatatgtgcgagaagtacaacaatattgatgccattgatgtccatttggctttctctggtccattttctcacaccgtcacaaatgacattgtgaaagaggtccggcagctgcgtgaaaatccggcattcgatggtctgctttcttattttttagagctgcttcatttgatcacagagcggaatgtaggcatcaaacgcgataaaaaagatcagctgacagcaaagcatgtccctttgaaaaagctgtcagaagcagcgcagcttgcacggcaggaatatggctgcacagtgcttgtagaagccattcaagggctgacgaaagagctattacgcgttgatttgtttcaagtggatgtgttatagatggcgtcttatcattttacaaccattgtgtcgaatacccatatttttaagcttttggcgctgattcattcgcttgaacaaaccgcccattcattcaagttgtcggttttatgtgcggaccctttggcttacaaggtgttaagtgaattccctcatccgcacgttcaatatgaacagcttgaagacattgaagatgacacgctgcgaaaggcaaaagatgatcggacgttccatgagtattgctggacgttaaagcctgcttttctgctcaaaatccttgagtcctcagaagcggattatctcgcccatttggatacggatttgtatttttatcatgatccagaggcggtatttgcagagaatccgctcgctcatttatttttgacggatcatatgaattccaagcggttctatcacttttatgagttgtctggccgctttaatactggatttgtcggctgccgcaacacagacgttgccaaacaggcggtcacacaatggaaggaaaactgtcttgcacactgtacagtagaaatggatacagaaaataagacttatggagatcagcggtatgttgaaagatggatcgatgattttgaaggggtccatgtggtgacatctaaaggagccaatgccgccatttggaatattgaaaactacaagttttcagttgtgaaaggggatatgtatctcgacgaatgtccactcttgttctatcatttttctgcctttacgatcattgatgagaatacctttaatcttaattggtattactatatgacagaacaaaatctagtggatcatctatatattccgtatgccgatttggttcatcaaaaaattaaacaggtgcaaaaggtctttccagaatttcagcaagggtttattgcaaagaagcacgttcctgacacgcatttttatgagatatgaaaaaaccgctcaataactgagcggttttctcctttttatgattcattccatttggagatggtttgatcgctaggtagtaagaaggccaggatgcctaatatcggtaaaaaggcgactccgatcatggtaggcgttaaaccgaaggcatcaatgaatgagcctagagcgactgatccaattgcacccataccaaacgcaagcccaacagttaaaccagacattgtgccaattttcccgggaaatagttcttgagcataaacgactgtgacagagaagcttgatgtcagaatgaccccaattagtccaagtaaaacataagcaaaaacaggtccggcaaatggcagcagcagggcaagtggaaaggatgccaataaggaaattaaaatcacggttttcttgccgaagcggtctgcaagcggcccgcctaaaaatgtccctattgcacctagaatgagaaataagaaaatataagtctgtgattctttaatcgtcaatccatattgttcaatcgcataaaacgcatagaaattcgatatcgcattcccataccaagagcgggcaaagatgagaaagacgataatgccaagtgctgtgagtgctgacttacgatgaatatcagatcttgcagcttttgctggagcctttttcgcttgagctcgaatggtttgaagtcttcctgcgtaccatcttgaaatataaagaaggaaaccgacagcaatcattccaacaatcgtaaaccaagccacgcctggctgaccgagagggacgagcattaatgcagcgatcagcggagcaaaggcttgacctgtatttccgcctacttgatagatggactgtgcaagtcctcgtcttggaccagctgccatgttggcaacacgagagccctctggatggaaaattgcagagccgagtccgataaagacaacgcaaagcaaaatggtggcaaaggaaggcgcaaacgcaagcccgaatataccgacagcactagaaaataaagcaatcgggagtgcataaggcatcggccgtttatctgtataccacccaatagcgggctgcatgacggaggagaccatatttaatgtaaaggcaatcagccctaattgtgtaaaggtcagccccattgagcgttctaaaatagggaacatcgcaggaataacggcttgcaatgtgtcgttcagcatatggcaaatgccaataatcaataaaatggggtaaaccgttgatccggtgacagaattttgaggtttatcctttgtacgagcagcaatagccaatgagacttcctcctttcattcaactgttttctattttgcattcttctcattttattcataaggtgaactataaaacaatagcaaattgtcatgatttagaaaaaagagacacaagtgcttgtgtctctaaagggttattgataaaaagatgcgatcacaggcttcattttttgaatgacgagtccgcttccgccgcggtttttcacaccttcaatcatgccgacgaggacgtaatcttcttttttaggattaaatgcaagtaaaaatccattttcagaaccgtctgttgccccttgtttgctcttcagctctgccgttcctgttttagcggcaatatcagctccttcaatttgtaaggagtgagctgtaccgtttggactggtcacgacctgagtgagcgcgtctttcactgtgtttgccgagtcttctttgatgatttgttttggtgatgctgttttttcatcttgaacgactcgaggatagacaagcttgcctcctgttgcaaatggagaataggcatgtacttgttcaatcggtgacatgagtaattcgccttggccataggcagagtcagcaagtaagatgtccgattgaatgccatcgttcgatacttgtgctggtttcattgtaaatggcatgtgcaaatcttcgccaaatccaaatgcttttacttttttctcgtaggtgtctttgccaatttccagtgcttcctgtccgaagtaaatattgtctgagtacacgagggcatcgaccatatttacgttttctttatcgtgaacccgtgtaattcgataattgccccaagattgatccttttgccatttcagtccatgaatggtgcgtactttattaggttttgtgacacctgtttccagcccgatggccgctgtaatggttttgaatgtagaccctggtgcataccggctcgcataccgggcttggaatgggaggtctgggttttcgctgtatgcctgatattgtttaggtgtgatcccgtttgtcatgagattgacatcgtaggaaggggtgctgacaagcgctaatagatcccctgatgatggattcatgatggtgacggctcctttttcacctttcagctgttcataggtttttttctgtaaagaagcatcaatggtcagcttcactgtttttccatcttttcgatctgatttttgtaatgtttcttcaatgcctgtttcatcatggacgatcagaatgcttccgccatcttgtccacgcaggtttttgtcaaacgtaaattcaaggccggttttgccgatgatttgatctgcttttaatgccggatttcttttgatatcatctgcatttgcttttccgacatagccggtgagatgggcggcggcttcgttataaggatagtaacgcatttccttcgattgataggtgacgcctattacatcctttggaatcggcttttgctctaacattgatttgagcgggacaaacgtgtcgtctgtgacccatgcttgtttcagctgattgtcaatcagttcttcgtctatatcaaacgccttgctgatttttttgatattgcgttctttttctttccctgtcccgagtttacctgggatgatgccaagtgcgtttccaccagttgtttctgccagcgtacgcccttttcggtctacaatgtttccacggacagcagggtctgatttgactttgatagtatctcccttctccatttgcgggaagatgagatttggcttccagtccactttccacttgtcatcttcttctgagagaacgcccttgtaagaaagcttgtgcagcttgccaaaagacgttttcattgtcacatcataggaaaattgatacccatttcctttgtcctgtttttcgacgttgagctttgatatgttcagatcataagcaccaattccgttaaagatattgtcatatttttcggctagttgtttttttgagaagtcattggctttcaaagacgcactcgttacctcatccaccagcttcgtaaagtctttcttctccaattgtttcgtaaaggattcagccgcttttaaagcctctttttcttttgagaaaagagtatcttttaagaaaaagagagcagctgctatcacgatgatgctaagaagaggaataataaattttttctgtttccaaaatgattttctttgatccttatacaatgaaaacacctcaatttttgattagatcttctatattttacagtgattgcacatgatttgtatagtttctcctatgaaaatagaccaaggcatcatgtcatggttttgaaaatgggagtaaaatgacagctgtttttatgaaagatatcttcattttttcatatgatttaaaggatttcttaagagatcatcgaatgtggaaaattagaaaaaatatgacaagcgctttcaataggggggaattgttatcgtttataaaaaagtgaatgtaattggacttattcttggaccgacactcttcttgctcgttctgtttctcatacctgaagatgaattgacctatgctgcgagggtagtcttgggcattacggcttggacggcaacatggtgggtgacagaagcactgcccatacctgcaacatctttattgcccatcatcctactgccgacacttggcgggctttctatggaacagacatcaagggcttatggagatccgatcgtctttatgtacatgggaggatttatgatcgcaattgccattgaaaaatggaacttacatagaagaatggccttacacattttgagggtgattggcacaagaagtgaccgcattgtattaggtgtcatgatcgcgactgcttttttatctatgtggatttcgaatgcagcgacagccctgatgatgctcccagtggcacttgcagtgattaaagaggtcaaggctaatgaaatcttatctggtccatctcttgatcgattcagtaaaagcatcttattgtcggttgcgtattcagcgtcaattggtggtctagcaacacttgtcggatctgtgccaaatgcggtgtttgctgcgatgtcaaaaaaactgctagatcgggaaattatgttttttgaatggtttttgtttggttttcctgttgcgatgattctgctcattctcttatttctgtatttgaccaaggtacagttcaaggtagagcacacaggtgaaatgagtgtagcgttcattcgaaagggattagagaatttaggaaaaatgaaacaagaggaaaaatgggtgtttgttgtttttctcatgacggcgtttttgtggatttttaagctctttttgtttggagggatcaccgtatctgatacgtctatcgccattttcggtgccatgctgttatttctcattccagcaacaaatggagagagaatattagaatggcaggatatgaaacagctgccgtgggggcttttgcttttgtttggaggtgggctttcgctcgctacgggctttgcagaaaccaatctaacgggatggattggggaaaatctacagcatttaaatgggctttcgtatatcgtgctgttgatcattttaacgggagcgattttgtttatgactgaaattatgtcgaatacagctgttgccaatatgattattccgattacggtagggcttgggcttgcgattggtatggagccatatgggttaatggctgcggctgctttggcttcttcatgtgcgtttatgctgccgatctccacaccgccaaacgccgctgtctttagtgcggacgtgctgaaaatatctgatatggtcagggcaggcttttggttaaatatcatcagtattgtggcgattgtccttgcggtgtatttctggctcccgattgtgtttaaaagctgagcgggttaagaagatggctttgatcgaatcgagaccgtcggtgtttttgtttcttttggcttcggtggtggtgtggattttttgatgtgagtgtcctttggcgtgtaataagcgtgttagatccagacatggtggactcaaattcagccaaaaacagcgtgatttaagcaaaaaaaagagaccgggaaaccccgtgtctcttttctaatgtgtttcattaagatggctttttcgtcttgcataggtgaagtaaacaacgacaccaatggctacccagataaggaaggctctccaagtcacccatgaaagggtcgtcgcaagtgtgatacaaatgaccgcactgataatcggaagaacaggcacgaatggtactttaaacgctgctttgacattcgggtgctttttccgtaaaacaatgacggcaattgaaatcaccgtaaaggctgcaagtgtaccgatactcactaaattcgcaagcgtcgataaattcacaaaacctacgatacatgctgcgacagcacctgtcagccaagtgttggcaacgggtgtttgcgattttggatgaacatttgagaaaacttttggcatgagtccatcgcggctcatcgcaaaggttaagcgaacctgcgcatagaccaaggcaattaaaaccgttgtgatcccaataatggcaccggctgatatgatacctgccacactatgaaggccaacgacttgaagagcaaatgcgacagggtcactgacattcagtttcgtatagtgaaccatgccggttaagacaaaggacacaccgatgtataaaacggtacaaacaccgagcgctccgataatgccaaccggcatcgccttttgcggatttttgacctcttcagatgcattggcgatcgcatcaaatccgagataagcaaaaaagactgttgccgcgcctgcgatcactccttcaaagcccatcggcataaagggtgtccagttttcaggtttgacgtaagcaaagcctgaaatgataaagagaaggacgatggcaattttgattaacacaatgatgttattcagcttcgtgctttctttgacgcctcttgagacgataaaggtgatgagtaaaataataagtgcgcctggaaggttaaagacggcaccatcagcggctccaggtgcagctgataaagccttcggtatgtgcagaccgaatccactgagcagtgattgaaaataggacgaccatccacttgctacagcagagagcgcaatgacatattcaagcatgagatcccagcccattaagaaggcgagaaattccccaagtgtggcgtaggaatacgtatagacgcttcctgacacaggaatggacgaggagaattcagcgtagcaaaaagcagcaagggcgcatgcgatcgcagccaaaataaaagatataataatcgcaggtcccgcatcctttgctgccgcaacccccgtaatcacaaagataccagtcccgaccacgcagccaatgccaagcaagattaaatcaaacgtatttaacgatcggctaagccgcttcgtttgactttcaagcatgagctggtcgagagacttttttcgaaataaagaactcatgttgacctcctaatggataaatcttttcgtaagacgaatgttagtatatgcgtaattgacaatttagtcaattggttgaaaaacgctttaaatcactaaagtgttaaacatcacaatcgaatttgtgcataaaaagagacatccgctggcaggtggaaggcggatgtggtgacgggggatctatgtctgttcagcaaatattttttcattgatcagcacacttggatgagtggggtaatgggcgtaggaggcaaggtgatgtgtcttggctttttccaaatcgccgagctgataataacaatagcaaagctggagatgtggataccacgttttatactgtgtgagtgtgaaggctgtttcgttttcaggagccttcagcgcctgctcataccaaaagatcgctgcctgatgtttattttgtatttttagatgatccccgatccggcagcaaaattctggacggggctgatcgtataagaaagaacgtaataatgaggataaagccgcttcctcgaagcctaccgcataatagcagtcggctaaatattggcatgtgcgaatttcatcctcaatccagcactgttttgtcgctaaaaattcatgataaaaacgaatcgccctgacatgctgcctgttatctcttaattcattggcaaagtaaaagagatcacgtggcgtcatgtcctctccttttgcgagcatgtcttcataaattcgaagattgcgcccgggctcaccagtggttgttttcttgcgcttttgatgtgtgacggctatatcggctggaaagatgttgccatacacttgaagaaactcatgtacggccccgtaccactgaaagttcaaggcacgcttcacaaggcgatttcttctatatttaaaattcacctgaccgtcttcatcaaatcccacatgataaaacattgagacggcgtccaccgaaggatcaagtgtctctttgagatgaagaagtttttgacggtcttcttcaagcagaacatcgtcagcatcaagccataaaatatactctttcgttgcatgtgagaaagcgaaattgcgggcttttgcaaagtgctgaacccattcgaaatcaagtacctgtgctgaaaaggagtgagcaatctccttcgtacgatctgttgatcctgtatcaacgatgatcatttcatctacaatgtcttgaacagaggaaaggcaatccgccaatacttcctcttcatttttcacaatcatacataagctaatggttaccatctttagatcacctcttcatagtgtatcgagcagcaaaaggaaacattcttttcagcagcgggttttttaaaactagttttctgctaccggctgatttaaaataaagggagaatctatgtaagggctgataaaaatgagtttattgaatgttgaaggattatataaaacatatggcgagaaaacgctgtttgatcatatttcttttcatatagaacaaaaggaacgcatcggattgattggaccaaacggaacaggaaagtcaacgctcctaaaggtcattgcgggacttgaatcgtatgaggagggtgacatctcgaaagcagggacacttgatatcgaatttctcgagcaagaccctgtaatgagcggggatgaaacgattcttgattacattttttctggaacggcacccatgattcaaacgatgaaggcatatgaaaaggcgctagccgatttagagcatgatccgcaaaatgaagcaaaacaagaagcgctcatgcgtatgcaaaatcgaatggatcaggaagacgcatgggatgcgaacctgtcagcaaaaacgattttgacaaagcttggtgtcaaagatgtgagccgctctgttcatgcattatcaggcggacagaaaaagcgtgtcgcgattgctaaaaatttaattcagcccgcgggattgctgattttagacgagccaaccaaccatctcgataatgcaacgattgaatggctcgaaggatatttgagtcaatacagcggtgctgtcattctggtgacgcatgatcgttatttcctaaaccgtgtggccaaccgaatttatgaattgaatcaagggcagctctatacgtataaaggaaattatgaagtctttttagaaaaaagagccgaacgagaagcagaagctcaggtgaaagaaacgaagcgtcaaaacttactcagacgagaacttgcatggctgagaagaggggcaaaagcaagaacgacgaagcaaaaagctcgcattggcagagccgaagagctgatggatcaaaaagggcctgatgcgaaaggagagcttgatttcgctatcggctcgcaccgcctaggaaaacaagtcatagaggcagaagacttatcaatttcatttgctggccagacccttgtggagcggtttacagatttagtcgtgccgggcgaccggattggatttatcggaccgaatggagtcggcaaaacgactcttcttaactgtctagcgggtaaaatagaaccgactacaggacaattgacgattggacaaaccgttcgcattggctattacacgcaggatcacaaggaaatggatgaagaactgaccatcattgagtacatcaaggaaacagctgagatcgtcaagacatctgatggcgccatcgtgacagcagagcaaatgctagaacggttcctattcccaagatccatgcagcggacgtttattcgcaagctgtcagggggagaacgccgcagattgtatttattgaaagtcttaatggaagaaccaaatgttctctttttagatgagccgacgaacgatcttgatacggagaccctcagcattttagaggattatttagaacagtttcctggcgttgttatgaccgtatcgcatgatcgttatttcttagaccgagtggttcaccgtctgcttgtctttgaaggtaatggccgcatttcacacttccaaggtgcttacagcgattacatggagcaagaaaaagaggcgaagcggacagagacaaagcctgctgagaaacaagtagaagcggcgcctaaaaagagaaaaaaactttcttataaagaccagcttgaatgggacggaattgaagaccggattcaggcattagaggaaaaacaccagcagcttgaagcaagcattgcggaggcaggcagtgattttggaaaaattcaagagctgatggacgaacaaaaagccgttgctgaagaactagaacaagcaatggaccgctggacagaactatcgctgatgattgaggaattagagagtcatgactaagaaataagaaacctgtagagttgatctacaggtttttttgataagagcatttcgcataggcatcatgctgatgaatggattcctcattacgacactcgacttgaaagcccctgacccatggctgctcatataattcgatggccattaaccttgtgagatcttctacaaagcgtggattttcataagcctcttctgtcactttcttttcatcaggtcttttaagcacaggatacagcggtgcactcgcattggactcaatgatatgtaaaagagctgctttcatgtcgttagggaatgatgcttgttcaaacaactctacctgaatggaaacagagccacgctgattatgtgcaccgtattcactaatttctttagaacaaggacataatgtggtgacttgtgcatcgcagccaatatgacaggtccatccatccttttcatgaaaatgaatgtcatatgtgattgtcgcatgcatcaaacccgatttcccggtgactgggctttgcttttccatgtaccaagggaaggaaacttgaaccgaggcagatgactgattcatctgacgggcaagcgctgctgtcaatgcttttaagctattcacatcaagcggctttccgctttcgtaaaacgagtgcagctgttcagtgagacggctcatatgaatgcctttttcgtgagctctcagggaggtactcagtgcaaagtcagcagaagttatttggtcctgcggtgccgttttagacaaaattcgtacaggataagacacgcggcagatgccgacttgttcaagatgaaaataaaagtcctgctccgtcttttgggtgtcagtcatgttctctttttgagaaggcttcgttccaaggcttggcggtacagatccgaattgttggtgtcgttcttttttgggtggaaaagaaaacatgagatccctcctttaaatcgtaataattcctatttattttgcatcaaaacacgagaaaaatcaagagtgagaacatttacgtttacgttaaggttataaaggtgtataataaatcatgaattgatgagcaggaggcactggcaatggaatggatgaaaattgatcaagtggcgaaaagaagcggactgaccaaacggacgatacgtttctatgaagagattggtttattatcagcaccaaagcggacagagggcggtgtcagactttactcagaggacgacatggaagaactagagaaagtgatgcaggcaaaagaggtacttggattttctttacaagagcttcaatcgtttatggaaataggaaagcagcttgagctgaataaagaaggttacttgctgtcgcttgatccgaaggaacgattagagaagctgttagatattgaggcgcagctgtctgtacagcatcaattgattacaaaaaagcttgaaacgattcaatcttttaaaaaggatcttgaagcgatgaaagaaagagcggctcatgcaattgagcaattacaaaaataaacacctctgcgtgtttattttattttgtcaacatttgaaggaaaggttctgatggaatgaaggaagaagaagtgttgaaacagcgtacaagtctgcttaggcagccgaaagccgtctgggctgttgcctttgcgtgtgtgatttcatttatggggataggacttgtggacccgatcttgccagccattgcatcacaattagatgcatctccaagtcaggtctctcttttatttacgagctacttacttgtgaccggctttgtcatgttttttaccggctttatctctagtcggattggtgcgaaatggacgttattaataggacttatttttattattgtcttttctgctttaggcggtacctcttcaacgattaatgaattaatcggctttagaggcggatggggcattgggaatgccttatttatttcaactgccctctctgtgattgtcggtgtgtctgttggaggaagtgcgaaggccattattttatacgaggctgcactaggtcttgggatttcggttggaccgctgcttggcggagaacttgggacgatctcttggcgcgggccattctttggcgttgcggtgttaatgcttgttgctcttttagccattacgtttatgctcccgccgatgcaaaaacctcagaaaaaggtgaaattattcgaggctgtcggggcgttaaaatataaagggctattaacgatggcatctgcggctttcttatacaattttggtttctttgtgcttttagcctattcgccatttgtgcttcatctggatgagcatggtcttggttatgtcttttttggatggggactatttttggcagtgacatccgtcttctcagcgccggtcattcatcgcaaacttgggacattgacttcccttgtggttctgtttgcttcatttgctgtgattttattcggcattggggtatggacttcacatgttgtagtcgtcatctgcggaattgttattgctgggggcatccttggcatgatcaatacagtgctcacgaccgctgtgatgggatcggcgccggttgaacgttcgattgcttcatcctcttacagtgctgtgcggtttattgggggcgcgattgctccttggattgccggagtacttgctgaatcttacacagcaagcaccccttactatgtaggggcggctgtcgttctgttaggcatgatcatcctgcttcttggccggaagcatttggtcaatattcaagcaggtcattaaatagaaaaaagccttatatcttctgaacagatataaggcttttttgtcgttataatacttttgtcgtccaagattcgcaattccaagtttcagtggctacatcttgataaaattcaggttcgtgagagatcaataagacgctccctttgtattcttttaatgcacgttttagttcttcttttgcatcgacatccaagtgattggtcggctcatcgagaacaagtaagttggtttcttcgttgatcagcttacaaagacggacctttgctttttctccaccgcttaaaacagacacgcggctttcaatatgctttgtcgttaatccgcattttgcaagagcggctctgacttcatattgcgtgtaagaagggaaggtactccacacctcttcaatacaagtgttgctgttttgctcttttacttcttgctcaaagtagccaatatgcaggaattctccgcgttccacctcaccagaaattggcgtgatttctccaagaagacttcgcagcaatgtcgtttttccgataccgttagcgccgtataacgcaattttttgcccgcgttccattttcagattcaatggacgagagagcggttcatcataaccaatgaccaaatcttttgtttcaaaaatcaatttcccggaagttcgtgccggcttaaagtggaattcaggctttggcttttctgctgcgagttcaatcatatccattttatccagtttcttttgacgggacatggccatatttcttgtgctgacacgtgctttgtttcttgcaacaaaatcctttaattcagcgacttcctgctgctgccttttataagctgcttcaagctgctgctttttgacttcgtacacttgtttaaattgatcataatcaccaacatagcgcgtgagctcttgattttcaacatgataaatcaagttaatgacgctgtttaaaaatggaatatcatgtgaaatgaggataaacgcattttcatattcctgtaaatagcgtttcagccactcaatatgctgctcatccaaatagttggttggctcatcgagaaggagaatttctggcttctctaacagcaatttcgcaagcaatacttttgtacgctgcccgccgctcagctccgtcacatcacggtccagcccaagatccgttaacccaagacctctcgcaatttcttcgaccttggaatcaatgatataaaaatcattgtttgtgagcgcatcttgaatgacgccaacttcctctaacagcttttccagctcatcaggatcggcttcacccattttgccgtaaatgtcattcatcgctgcttccatggaaaataaatagtggaatgcatcctgaagcacttcgcggatcgttcttcccttttctagtacagtatgctgatcaaggtagccgacacggacattttttgcccattcgacttttcctgcatctggctccagcttgccagtaataatattcataaacgttgactttccttcaccgttggcgccaattaagccgacatgctcgccttttaataaacggaaggagacttcgtgaaaaatggctctgtcgccaaagccatggcttaaatctttaacagataatatcattttttacacctcaaatagattcaaaacggctagtgcctctcatgattatatcgaactgtccggctcgataaaagcatcaaaagaaaaattgcgtttcaaagctgattttgagatactaaaggatagattgaatgaggataaaggagatcgacatgatagaaaattgggcatttttgaaagaagcaaagccatttattcaggaaaactttcaagcggctggcttcgaaaaaccaacagctatacaagaaaaaacagcagagtggattacggagaagcgtgatgtgatcgcagaatcgcctacgggaacggggaagacactggcgtatgtgttgccgcttttaaataaaatcgatgtgaatatcaagcacccgcaagtcttaatcttggcaccttcaagagagcttgtgatgcaaatttttgatgtcgtgcaagagttcaaacaagggtcagatatcaaagcggtctccttgattggtggagcgaacatcaaaaagcagcaggaaaaactaaagaaacacccgaacatcgttgtcgcaacacctggccgtgtacaggaattaatcaaaatcaagaaactgaaaatgcacgaagtcaaaacggtcgtgctagatgaagcagatcagcttcttgtgccagagcatatgaaaacgatccaagcgatcattaaatccacattaaaagaaaggcaaatcctctgtttttctgcgacgttaaaagaggaaacggttcaactgattaaacaaatgacgtctgaaccagaagtattgaaaattgccagaagtgaggaagaagcgcagaaagtaggacactattatctgttatgtgatcagcgtgataaagtgaaattactgcaaaagctatcacggcttgaggacatgcaggcgctcgtctttgtgcgtgatattacgaatttaagcatttatgcagagaaattagcgtatcaccatgtcgaccttggtgtgcttcatagtgaggcgaaaaaagcagaacgtgctatcatcttaaaggaatttgaacagcgtgaattcccgcttctccttgcaacagatatcgcagcaagaggcatcgacattgacgatctgccgtacgtgatccatgccgacctgccaaacgaagaaggctatatccaccgttcaggcagaaccgggcgcgcaggaaaagaaggggctgtcatcagtcttgtcacacctcaagagcatgcaatgctcaaaaaaatggcgaaaaagctgaatcttacgcttcaggaaattgtttataagcaaggccagctgcatcttgcgcccaagcaagcataaaaaaaggacccttccacatggagggtccttttttattatgaaattttgacaagctgttttccgacattttcccctttaaatagtccaaggaatgcatcaggaatgttgtcaaagccttcaatgattgtttctttataagtcagtttgtcttctttaacccattgtgcgagatctcttgcagcctcttcaaaacgatctgaatagttggcaacaatgaagccttgcatcaatgcgcttgttttaatgagttttgtttgcacacgcggtccgatgtcctcgcttgcgctaatgttataagacgaaatcgcgccgcacactggaatacgtgcaaagcggttcaaatgattcatcacggcatcagaaatttcgccgccaacattgtcaaaatacacatcgacgccgtttggacaggcctttgctatggcatcatctaaatcatttgttgttttataattaatcgtttcatcaaagcctagttcttttaaataagccagcttatcatcagatcccgcaatcccaacgacgtgagcgcctttgatcttagcaatttgtcccacaacggaaccaacggcacctgcggctccagaaatgacaacggtctcgccttcttttggctggccaatcgcaagaagtccgaaataagcggtttgccctggcatgcccaaaatgcctaaataataggacaatggcgcaatggatggatcaattttagtcagagattcagctttggctgtagaatattcttgccagccaaggaatccaagaacaaaatcccctttttcaaattgaggcgatttggattcaacgacttctccgacaacaccgccctgaatcacttcatttagcttaaatggaggtgtataggattttgtatcctgcattcgtcctctcatataaggatctacagaaacatatttcgtttgaatcaagacttcgccatcttgcggcacaggtatatcgactgtttcaaaatgaaaaacatcttttgtaggtaatccttttggacgtttggctaattgaatttgcttttgttgactcatgtcaaatcctccctttcacttgcagcctagatttacattaacatgatgcttcttttcattcaaaacatacggtctttttcaaacacatacaaaaaagcagccgccatctcatagatgaggactacttttttggaagtcaacagagaggagcggcggcagacagccaaacagctgatacgcgtccgcatcacgttcttttaacaaatattcgttcgcattttgcatggaggctttcatcatatcgcgcgtcacaaaaggaaaaaggatattcaagtatgaggacaacaggtcttgtggatcttgttcaatcgactcgatatctccaatgttaatgatgattgaaaagagataatcaatggagatgcgaaagtgctgttcagcaaacaatgtaagcggctttgcttttgcttcttcaggattccacttctgaaaaagctgtttcaccaaatcactgacaacccaagcattaaactgctgctccgctgaaaagtaatacatcagctctacctcatttctagcctccagtataagaattgtacaacaaaacagcagggatgaatacaatatttcagaaaatttagtcattttttcgggctttttgtcaaaaataagccaataggcacggttagtacacaatgtaaaatggatgtgctcaaggaaggtttaatgacaaaagtgacgggtaaaagattcgtaagacgctaaaggaggaatataaaatgaaacctgttgtaagagagtattcaaatgatgagacacttcaaagagatgtagagcaattaaaagcactcggtgttgcaagagaggacatttatgttctgtcccatgacgatgatcgtacagagcgtattgctggaaatgcagatgctaatacgataggtcaaagagaagttggacttaaacatgctgttgggaacatctttagtaaaaagggcgatgagctccgaaataaaatccatgaaattggtttctctaaagaagaagctgagaaatttgaagaacatttagatgaaggaaaagtccttctctttgtgacagaccatgaaaaagtgaaaacttgggcataaacgccaactgaaaaaagcctcttactttcgtaaggggctttttttcatgccgatatctctgaaggagagaacacatcttttttactataataagaaaaaacagcagattggaataaacagtaaatcatctaattgaaaatgcagatataccaaagaaaatgataggaaatgagaaaagaatagtcaaaatttcacaaaaatccattcgggaaataatcattgtatctttcgattttgtttcaaaatgtaataaaaatcttgtgtaatttagtagataaatttcttagttctattggtttatgttgtatttttgtgtagaaataagtgttttgaggtcaaaaaaccacgaaaaatacctgtattttcaattagaaaattcattttaatgtttaggaaataacttgttgacaaaataatctaaaaacaatatatttggcttattccagtcattatggaagtagttgttaaatttctgatgggtttattcaaggcacattctagtgagaggtggtgtcataaaaccaaggtacaagcgcttttaagagaaaaagcttgcttggaatatttctactaaaacataagaaaacggtcttttaaaatggtagccgatctaaacagtagattgacctttctactatgatcactttgcaagagatattcaaaaggcgttatgttcttgtccaagagagaaagcggtttcaataagggctgtgagttgatcgaacggtgaaggaggtgaactcatatgaaaaaaaaaagacaataagctgaggcgctgcagctctcaaatggctgcatatgaggatgcatgctgaaaaagaagagtgaacatgtgggatgcttctctcctttttcagaaaacagattttcctaaaaaatccatctttcattttaacataaggtttttggcttgaaaatgacctttgcccgaaaagccgattttgaatagaaggaggtcctgtgatgaaaaaagctttatatcatgaagacagtgggttgtatctagaaaaaatgcgtatggcatttcaagaacattatgaaaaaagaacagatatgtggtctactgatccatccttaacagatgcagccgtgatgtcattaaaggcatggcattcacgggaaaagaatgcacttgcttctgtgctcgatatcgggtgcgggaacggccgggcacttgaacatttaagggggctttctgcatatgtcggtatcgacctgtatgagcatgaggagtgggaaggattacagaaaagagaaacggttcctgtccattttgttcatcaagattttatgtcctggtcgatggatcagggacgcgggatgcagtttgatttaattttagatcatggctgctttcatcaccagcatcctgatgatcatgagcgttatttaaaacaggtctcctctttgcttcatgaaggcggcgtcttctcacttgttgtatggggagaagagtggagaacagggttaatcggagaagatggccgtttccacttttcattttcagactctcagcttggagaaagaatttgttcatcaggtctggagcttgtatcgattacaccattaaaagcaaaggccggcattagccagcatcatgtcattgccgtcaaaatctagtacaaaggtgatcactcaaagctagcagaggggttcattctaagaaagagcatgtgcgcatcatgtaggcgaaaggcgttatgaaccaagatttctgctcctttgtactggacaagacctagattgaaacatcgctagaagagctgggaacgaagacattcttgcgaaaatcagggtctgaacgatgagaggaatcgcacatccatattctttttaggcatgagtgccgcttgaaataggagcacatatgctaagggagtgcggacacatattcatcactccatcactgcgctatgagagtcgatttgggtgcagcgatgaataggggggagacaaatgaacaagtttgtagatgaattacaatcaatgattcatcattttacctttcaagaaaaaaactatttgctcgtggggccagtgaacctgccgatctccattcaacatgaagaagtgccatttaaatggtatgccttcgcacctgttgaaggggagacaaaaccaacgatcgaatctattgtccaaatgagtaccgcgcagcaaaccttttcctcttgtctcttatttggcgactttgaaaatgaggtgccgccgctagtgcgaattcatagtgtctgccaaacaggggatgtgtttgggtcactgaaatgtgactgcggtccacagcttgcgttatcgctgaagaaaatcaccgattacggtaaaggcatgctcgtatatatggccaatcaagaagggcggtcaattgggctgatggcgaaagcattgacgtataaattacaggaaatgaagctggatacttttgaagccaaccgcctgattggctgcggagatgatgaccggcattacgaggaggcagcggctgttctgcactatttaaacaaagggaaaccaatgcacctcctaacgaacaatccagataaagtcgattccattgctgcttacggtcttcctgtattgcgatttgatcatacggtcgaagcttctctctataatgcagcctatttgaaggcaaaagcagcctcaggacatatggtcgatgagaaaaaattaattaatcagtagatgagtttactttaaagaaggcgggagaaaagcgtgaaacctgaaatcaattggattcaaatcccaagcggctatgcaacgattggaagtaatgaagaagatatgaaaaaggcatcagaattctggaaggacaagcttctcaatccaacctacggccgtgagaaaaaatttcaaaaatggctgtacaaagaatttccatcctatcagccgtatatcaatgaattttttatttcagatacggtcgtcaccaatgaatggtatcaaagctactgtgatgaaacaggccaggcgtacccggagagcttaacgaatcaagagcttggtggcgggaaagatcatccggcttggggcatggatatcgaggaagccttctcgttctgccagtggctgagcgggaaacttgggttagacgtgtcgattcctactgaagaagaatgggaatatgctgcccggggaaatacgagaaatcaatacccgtggggagatgagtttgatccttctttatgtaatacgttcgaatcaaatattgaaaaaacgacgcctgtccgtcaatacaaaaagggcagatccttatttggtctttatgatatggggggcaacgtcgaggaatgggtcaacaccaaatatcatgtatacgatggcggcatcgaggtcgtagatgatttaacggagacgcttggcagtaattactacattttaaaaggcggctcctttgcaagaggcggagatttatgcagagtcgccagaagacacgggaagcatccagatcccgttttccgatttactggttttcgtatagtgactcgtcaaaaacaacatataaaggtgggagtgtaaaatcatgcatagaggaccgattacatctgttttatcaactcagcaggaccaaattgtttacactggcggctatgaccgttgtatttataagtggaaccgggcaacaggagaaggaacgtttattggaagtcacgagcatatcattaactctttatctctttctgaaaacggaaagtatttagcgagtgcatcgtcagactacaccattcaattgtatgatacagacactcatactcgaattcgcaccctgtttggtcatgcagatgatgtagaagccgtcgcctttgccaaacaggataccttactagtatcggtgtctagagatagaaggtgcttagtgtgggatatcgaaacaggagctgttttaagagaattccatggacatagcaaagatgtattagctgtatggatacatggcgataaagcttatacaacaggtgatgatggctacgttcttgtatggctgtacgatacaggagaaattgtaggggaaattggtccgtttgattatgagctggacacaatcagcggcagcaatcaaaaagaagtgttcgcacttggcagagacgatggcaccgtcattatttatgatgcggttactttacaggagaaaaaaatcattaaagcccatttacagggcgtcaagcgggtgaacttttctccaagcggcaattacttgctgacagcaggctatgaccatttaattaagctgtggaattatgaaacaggggatttagtcgatacgttgctgcctcataaatatcagtgggagcgttcgcttgtctggacggaggatgagaaatccatcctaggagccagttttggaaaaacgtattgtgaatggtctattgaaaagggaaaagttgtatcagatgagattgaaatggcgacaccatctattaatgatattgcgctgactgatgcgggagatatcatcacagcatcagatgacggaaaattcagaaagaacgggattgaaatcgctaaatcgacaggcgttttaacaaatggagtggctgtcgcacgagatggaagctattatgcgtggggagatcatgcaagtcaggtgcatattgttcatgaatcattacagcaaatggtttcgtttgatctcaacacagggccggtcaacagtgtgtatttccacgaggaggatcggcaattctatattggaacttacggcggttatgtacatgtcatttcgacagaacatttaaaggaaattggccgttccaaagcacacgattgtgctgttaaagcattaaaagtagaaggagatcatatcatcacagccgcggtagaaggaaccatctgtcttttagataagaagagcttgtctttaaaagcgaaatatatcggagcgacagagctgttaaatgatgtattcattgatagtaaaagagatcgtattgccattgtcagccgtgacaagaatgtgagattgtttgatttgcatacaggaagaattttagaccagcataatgaacaccagtattctattaaatctgtctctgtcacagactctggctatattgtgagcggagattattggggctatgtcgttgtgtggaatccagagctagatgtcaataccggcccaattagaattgccaagaatgggattagtgccatcagacaattaggcaatgatgtatacgcaagctcatatgacggcgggatttatcatattcgagaagatggcacacatactgaagtactgcgcttatttgaacaatttccgaaagaagtaatctctcattaagaaaaagaatgtaagcgggggattctcatgataagtgtttgcaaggaacatatgaaaaaaggcctgactgtactcaattgtccgcatgtgctcctcattaataaatatgaattacgcaaatgctgtttttgtaaacaacgagcatcatataaacttttttattccttgccttactatgatcgatctgaaaagaaacggatggaaaaaatatagcacatgagaatagaactccttcatttcctgaaggagttctttcccttgaaagagaagaaaggagactcacatgaaagacgatgttttttatatgaagctggcgattgccaacgcaaaggcaatgaaagggcaaacctccccaaatccgcttgtcggtgcagtcattgtacagcaaggtgagattgttgggattggtgctcacatgaaggcgggcgaacctcatgctgaaattcatgcgctgcaaatggcaggggaaaaggcaaagggagctgacatgtatgtgacgcttgaaccttgttcgcatcatgggaaaacgggtccttgcacggaagccattatcaaaagtggtgtgaaacgtgtagtcattgcgacgcaagacccaaatccgcttgtcgcaggtaagggggttaccatgttgaaacaagcagggatcgaagtagatgaaggaatatgtaaacaggaggcggatcgcttaaatgtgcctttttttcatttcattcaatcagaccttccttacgtcatcttaaaatcagccatttcgttagacgggaaaattgcaacatctcatcttgaaagcaaatggatcacaggaacagaagcgaggaaagaagtgcagcaattgcgtcaagaagccgatgctgtgataacaggtgtcgaaacgattattcaagatgatgcaggtcttattgtgaaagattcaatggcgacccagcccattcgtgtcattttagattccacattaaggattccgcttcatgcgaaatgtttaacagatcatatggccgaaaccattatttgcacctcgcacatgtatgatcagaaaaagtatgaacagctggtagataaagggcatcaagtctatgtcacaagcggagagcagcggacaaatattcatgacgtgttacgaatgctgaaggaacgttctgtcatgtcagttctcgttgaagcaggaggaaatgtgagtgcgtcctttttagaagaatcactagtcaatgaagccgtcatttatatggcacctttattaatcggtggaaaacatgcacctactttttttgaaggagagggggtgaaaaaactaaaagaagcgatccgtccagcagatattgaatatagtatggttggaaaagatatcaaaatgacaataaaattctaataaatgtaagactttgtgcatcgagcgcaaggtcttttcaatacttcttgataaaaataaaagtgtacatacacctttccaaggaatgatgaatacgatggatggggggtgattccatgagaagatgtagacaatgcggaaagacatatccaactcattcgacagaccactaccaaaaaggaagctggtatgatgcgtataaggatgacggctgggaatgtgatagttgtaagaaagggaaatctggaaagccagggaaaccagtgaaaaatccttgctgcggaaaagatccttgtgtttgtgtgattcaaggtccgccaggcgggagaggaagaagaggcccagcaggtccagcaggtgcagtgggtccagcgggtccagcgggtccagcaggcccagcaggcccggcaggagcaactggagccactggtgtaggcttaacgggcatcgtggcatttgatccagcggtagccccaacctatccagtaggtcaagtcgtgacattcgatggaagtacgtatgtggtgaattcagcgccgccaacaggtacgccaggtacgtcaccagattatacattgttagcagctgctggtgaaacgggtgcaaccggagcaacaggtacaggagcgaccggtgcgacaggagatacaggtgcgactggagttaccggagcaaccggaatcacaggagccacaggagcaacaggtacaggagcaaccggtgcaacaggagatacaggtgcgactggagttaccggagcaaccgggatcacaggagcaacaggtacaggagcaaccggtgcgacaggagatacaggtgcgactggagttaccggagcaaccggaatcacaggagccacaggagccacaggagcaacaggtacaggagcaaccggtgcaacaggtgatacgggagcgactggagttaccggagcaaccgggatcacaggagcaacaggtacaggagcgaccggtgcaacaggagatacaggtgcgactggagttaccggagcaaccggagatatcggggtcaccggagcgaccggagtaacgggagcaacaggagatactggagcgaccggagtcacaggagcgaccggagatatcggggccaccggagtcacaggagcaacaggagatactggcgccaccggagataccggcgccaccggagtcaccggagcgaccggagtaacgggagccacaggagatactggcgccaccggagtcacaggagccacaggagataccggagtcaccggagcgactggagtaacgggcgccaccggagataccggcgccaccggagcgactggagtaacgggagcaacaggagatatcggggccaccggagtcacaggagccacaggagatactggcgccaccggagcgaccggagatatcggcgcgaccggagtcacaggagcgaccggagataccggagtcacaggagcgaccggagataccggcgccaccggagcgactggagtaacgggagccaccggagataccggcgccaccggagcgaccggagtaacgggagccacaggagatactggcgccaccggagtcaccggagcgaccggagtaacgggagccacaggagatactggcgccaccggagtaacgggagccacaggagataccggagtcaccggagcgaccggagtaacgggagccacaggagatactggcgcgaccggagtcaccggagcgaccggagtaacgggagccacaggagatatcggggccaccggagtcacaggagccacaggagccacaggagatactggcgccaccggagtcaccggagcgaccggagatatcggcgccaccggagtcaccggagcgactggagtaactggagccacaggagataccggcgccaccggagttacaggagcaaccggagcaactggatcgagtgcgattattccatttgcatcaggtacccctgctgtcttgactacaattgcagggggtcttgtcggaacttctagtttggtcggctttggtagctctgcaacaggcgttagcatactaggtggtatcatcgacttaacaggagcagcaggtactcttttaaatatggcattctctgtaccaagggatggcactattacttcatttgccggatactttagtactacggcagcattggctttagtcggcacgagtattacagtgacagctagcttatttgcttcaccgacaccagataacagcttcactcaagtagcgagtgtcacattggcaccaccattaacggggattttaactattggtgctatttcaaacggaatcgctaccggcctgaatgtgccagttacagcagaaacaagattactggttgttttctctgcgactgcaacaggcttatctttaattaacactgtagcaggctatgcgagtgcaggcttatctatcacgtaattgaaacagggatgactcgatttgagtcgtccttttttgtttgaatgaattttctcttaacttcgtaagaaaaaatgatatgattttcttaaagtctagtcgatgaatctacttgaattaggggttgtagcggtgaggatgggcaaaaggaaagtcactttacaaacgaaaattttggggttaattattgggcttttgcttgttgtcattgcgttattgaccatttgttttggttttctgcagacatcagaaaggcagcggcaagctgaacagctggcggtgcaaaccgctagaacaatctcatatatgccgcccattaaaacatcggtgggcacctcatcagtgtctgagtatgaagaacaggcagtgcttgagcaaatgaaggatcaagtcagagcacatgccatcttcattaccaatcaaaaagggaaggtcctttttcatacgaatcatgagaatgtaggaaaaaccatcagtgtatttagaggaagaagtaccctgctatttgggggaacctccatatcaacgggtgattctaatggtgaaatcgttgtcagaggcagtgccccgattatgaaagaaacaggcaagcatgaagaaattattggcacagtcaccgtcgaatttttaaaaaaggaaattgatcaagcgacagcccatcaactaatcaagcttagctatattgccctttttgtgctcttgcctggtatattcggagcgatttttttaacaagaagtattcgcaaagatacattagggcttgaaccgcacgaaattgcttcattatttcgagaaagagaagcgatgctgcttgctataaaagaagggattattgcatttgaccgcaaaggcgcgataacgatgatgaatacatctgctgaacacatgctgcgcgtttcatcggagctgccgcttcatattgaccaagtcttgccaaaagccaatctccttttctatttaaaggcagaaacgattgaaccgaacatcgaaaccgtcgtcaatgataaaacctatgtcttaaatgtgaaaaaagtggtccaggacaatcgagtttttgggggaattgtgagcttccgagagaaaacagagctgacgaagctgctggatacattaacagaggtcagccaatattcagaagacctgagggcacaaacgcatgaattctcaaataagctgtacgccattttaggtttgcttgagctgaagcaagtggatgaggccatcgacttaataaaggaagaatatacgctgcaaaaccgtcagcacgatttactcatgaagcaaattcgatctcctaaaatacaagccatcttactcggcaagttagggaaagcatctgagaagaaggttcatttccacatcgatgaaaatagttcattggagccgcttccaccacatttaagtctatctcactttattaccatcattggtaatcttgtagataacgcctttgaggccgtactaaataaggagacgcgcgaggtaagcctgttcattacagatattgggtttgatattatcatagaagtatctgattcaggtgatggagtaaacgaggaagaactttcacatattttcacaagaggccattcgtcaaagggggaaggacgaggctacgggctagcgaatgtgaaagaagtgttggacgaacttgggggctggattgaagtgacgaaccaaaaagaaggcggtgccatcttcactgcatacataccgaaaggcacaaagggggaataaatggtgatgaaggtactcattgcggaggatgattttcgaatcgcagccattcatgaatcttatatacaacaaatagaaggatttcaaatcgccggaaaggcaaagagtgcaaaagatatgtgggaggcgctccaaaaggaacaagtcgacctcatcttgcttgatgtatatatgcccgatgagctcggtacaaacctgttgccgcttttaagagaacactatccagaaatagatgtgattattatcacggctgcaacagaaacgacacttttaagagatgcacttcattacggagtggttcattatttaatcaaaccagtgaccgcacaaaagtttgcgcaagttttaaccgaatataaagagaagaaagacatcatcaattctaaggatgaagtcaatcaaacgatgattgatttgttttttggacagatgcaagaagagccaaaagaaaaggatggcagggacctgcctacagggatcaattcgctgactttggacaaggtgaaaacattgatggcatcagagaataatgggattacagcggaagaactcggagaaaagatgggggcttcacgcacaacagcgagacggtacgtcgagtatctcgtgacaacaggagaatgccgggcagagcttgcgtacggaatcattggcagaccagaacggaaatattatcctgccataaagcaagcggagtcataaaagatgaaaaaaggaatatgccttgtcattatgatctgtctttgtatgacgctcacctttaatgaaaaaaagggaggcgactctttcctgcagcacagcccattatatattgtggtgtctggtgtccctgacggcggctttgaccaaacagctcaagtgatgaaatcagtgctcgagaaagaaaagctggtgaagcggccggtgaatatcctttatcaaagaggcggaacggtggataaaggatggacatatatgatggagcgagataccaactatgttagtttgaattcaagcttattgttaagccgtaatttgcttggcagcagtaacatgacaatgaacgatgtcacaccgctcgccattttggcagaagagtggcaggtcgtcgcagtcccagtggattcttccttttcaaatgggaaggagctattaaactcactaaagaagaaacccgattccttaaaaattggatttgccccagacttcggtaatgatgatcaaatctcattcgcacgagcggcagaaatggcaggaattgatccatatcgcattcaatttttgaaatttgacagtgcagatgatttattccaagcgctcatagatcatgaagtcgatgcagcaactaccacgattacagaagttcgtcatgattatgaaaagaagaggctaaagctagtagcaaccacaacgaatcagcgtttagcgggatttgaagatgtgccgacttggaaagagcaaggcatcccgctcatcttctctcattggcgtggtgtgatgggcccaaagcaaatgaatcagcatgatattcgtgaatgggatcagcttcttcaaaaaatgacacaaacgaagtcctggaaaaagcaattaaagaaaaagggctggacaagtcgttatatgaacagcaaagaggcaaagatctttatggaggagcaattaaggcgatatgagcagtttatccaaggagaacaagcggtcgagtgagaccgctttttttcatggaatccatcaaaatcaaagtttgaacaaaatgaacaaaaagcatttatcgaccgaaaaagaattaaaattcataatatttacttcaatttcaacgtcagatatcatgacagaaagggttggaaatgggataccaacatttaatgaaagcgtatacaacataaggggtgaacaaagtgttagcaatattaggatttcttatgatggttgtatttatggttttgattatgacgaaacgtatgtctgttttaacggcattggtgttaacaccaattgcatttgctcttattgcaggttttcattttactgaaatttcagacatgattgtcaaaggtgtgcagcaagtcgcgccgacagcggtcatgattatgtttgcgattttgtactttggcattatgattgatgctggtttatttgatccaatggtggcgaaaattttaaacattgtcaaaggtgatccattaaaaattgtcgtcggaacagctgtcctgaccatgcttgttgcacttgatggtgacgggacaacaacgtacatgattacaacaacagcgatgcttccgttatttacgctgcttggcatccgtccgattattttagcggggattgccggagttggcatggggattatgaatacgattccatggggaggtgccacacctagagcggcgagtgcacttggcgttgatccttcacttttatttggcccgatgattccagtcattggtgcaggggttttgagcatgattgtggtggcatactttcttgggaagtctgaaagaaaacgtcttggtgtcattgagctcgaccagccgattcatgcaaatgaaatggcagcggcactacaggatgacatcaagcggccgaaactttggtggtttaacttgacgcttacgttgttattggtgctccttcttgtctcaggaaaagtcagcttaacggttctatttgttcttgctttctgtgtggcgattatcgtgaactatccgaaccttgaacagcagcgtgaacggattgcggctcattcaaccaacgtcttagccattgcttccatgatttttgcggcaggggtttttacaggcatcttaactggaacgaaaatggtcgatgaaatggcgatttcgattgtatctgccattccagagcagcttggcggcttcattccagtcattgttgcgttaacgagcgggatatttacgttctttatgccgaatgatgcatacttttatggggtcctgccgatcctatcagaaacagcggcagcatacggtgttgataaaatcgaaatcgcgagagcttctattattggtcagccgattcatatgctaagcccacttgttccatcgactcatttacttgttggacttgttggggtatcactggatcagcatcagaagtttggcatgaaatgggctgtacttgcagtcgtcgccatgacggtcatgtcgatacttattggggccatctccatttggtaaataaaagagtgtctgctacttgagcaggcactttttttaggtcatattgccgagcaggctcgattcatttgccctatacaaagacactcttgttcctccaaaagatatatttttgaaaaatactgacacttttactgtttttttctttataatgcaaatcaacgaagggagaggatagcatgtccaaccgaaaaggcacgattctttttactgctgtatgcctcatagcaggaagtttgtcgatggtgagcccagcttcagctcatgcagataccccttattttggaaagagttatgaacagccggcctcagtgaagaagctataccctgaacctgacaagacgttcgacacccctgcctttcagaaaaaaggagaagcctttacgacacaagaagagcttcaagaattcttacgtgatattgtccgcaaaagtccttacgctacgcagaaacagattggaacatccattgaaggacggtccatttcagctctctactttacaaaggatcgtcatatctctccactttcaaaaaagccaacgatctggcttcaagcacaaatacacggaaatgaaccagcctccggtgaatctgctctcgtcatcgcaaaacgattagcaggtgaacaaggagagcgtatactcaatcatgtgaatatgatcattgtcccgagaatcaatcctgatggttcttatgcgtttgaccgcaggcttgcaaacggaacggatggaaaccgtgatcatatgacattagaatctccagagctcacagccctgcatcaagaatttaatcggtatgcaccagaagtagtcattgatgcccatgaatacgatgtgggacaaaagcagtttgatgatatcggctcagcgggtgccctcaaatatcacgatttactgatattatcaggcaagaacttgaatattccagaaagcatccggctcacgtcaaatgaattatatgtgagcggcgtccgtgaaacgctgacaaaacaaggattttcgaatgatttatattatacaagcacaagaggaaaggatggaaagatcgatctctatgaaggtggaacggatgcacgaattggccgaaatgccttggcgctctcgccagcgctatcctttcttgtagaaagcagagggattggaattggaagagaggattttacccgccgcgtcgcagcacaagtcaccacacatgaaaaaatcattgaaacaacggtgaagcatgctaagcaggtgaagcagcaaatggtgacggagcgactgaagctagtgaaaaaaggacttcaatcaaatgatgacgatcaagtggttattcaagatgatttcaaagcgcctgtggatgattcgcttgaaatggtggatattgaaaaaggacagaccatcaatgtccctgtacgctttcacagtgcgagcgatgctgttcctgtcatgtcgagagaacgaccgacagcttatctcgttttacctgggcatgaaggggtagaacggaagctacaaactttagggttaaaaagtgtcacattgcctgtcggcgtgaaagtaccggtacaagcctatcaagtaacaaaacgagacgaaaagagcaaaacagatattcagcttgaaacaaaactcacccaaaagaaaagtcagctgccaaaagggacaaaggtatatatcacggcgcagccgcaaacgaatttattgtcacttgcccttgaaccagaatcaaaagacagctatatgtcatctgggtttattgcttcaaaagtaggcgatgaactgccagtgtaccggttcttgctatctaaaaagacgttaggcattaaataaaaaagggctaaaataaacatcattttagccctttgtctacaatctagaagcggcacagtgcgtgccgcttttttattttcgtccagctcttatttcatcagtcaagccttcatatggtgcttcggcgataatggtttcgtcatttacacctgcatgatggatatacgtaatgtccgcaaattctggaacaacatattttggataggtttcgtatttttcacgagattctttcatgagatcgatatagtcattttgatagcaaactgtgatatctggacgttcatgcacccattttgggaagaagatgacgccatgcatgcgtttttcttcaggcataaagttcagagagacgtctgtcccagttggttctgtccaagaaactttgtaaacgccttttgtcagcttcacaatattcacttcttgatcacggacccagcggcctccaaccattccgctatgaatgcggtaatcaatggtgtgatcgtttttaatgtaaatctcatattcccagccattttcatacgtataaatcatatgaagtccaacgaattgatccatgtttattccttctttcattagaatgatattatttcaaacatgtcatgatttacatgtttattttaaagtctatggtataatattgtcaaagaataagcgttggaggcacattatgagagttttaaaatatgccattcttggtttactagatcagtgtgagctgacgggatatgatataaccaaacattttaaggattcccttggacagttttggagcgcgaagcacagccaaatttaccctgagctgaagcgtctcacagaagaagggtttattgaatttgatattcgtatacaaggaaagaagctggagaagaaggtctatcaaatcacagaggcagggaaagcagaattgcatcagtggttaaggacaaaagacccgataccagaaacaacaaaggatgaattcatgctcaaaacatttttcatctcttccatggacaacaaagaagcggctgacttgtttacacatcaactgctagagcgcaccaaaaaaatagacatgctagaacagaagctgcacgctttaacggaggaagaccctgccgctgaatcgcttcattcagcgcaatttgggcattacttagtgctgacaagggcaattgaaagagaaaaaggctatgtccgctggctcgagcagacccttaaacggattgattcatccgcgctctaaggacaatggtcggatgatatgataaaaaatggtttgaaaccagtgaatttattaatagaaaccgctacaatggatatattcgtattaaagtgaggcgagtatgtttgagtaatcaagaagcgttgtggaatgaagcagaagcttttatttctttatgctatgaagaattaagcaagtcaaatgaagagaaagcagcacgtctgcatgaaataaaacaagaaattgactctgaagggatgtatactcacacacaagaggaattggcgcacggggcgaaaatggcgtggcgcaacagcaaccgctgcattggccgtttgttttggtcaaccctgcaagttcacgactgccggcatgtgaagacagaagaagaggtgaaagaggcactctttcatcatattgagtatgcgacaaatggtgggaaaatcaaaccatccattacgatctttcctccagaaaatcattcgcaaaaggaagtcgtcatttataatcatcagctcgttcgttatgcaggctatgagacggagtatggcatcattggcgacgaggcatctcttgaattgacaaagttgtgtgaagcccatggctggaaaggggagggcacgcattttgatattctgcctctcatgtttcagctaaaggatcagccgcccgttctgtatgagcttccgaaagaaatcgtccaagaagtcgagattacccatcctgaatatgaaggatttcgtgatttaggattgaaatggtacgccgttccgattattgctgatatgaaattagagattggcggtattcattacaatgcggcaccgtttaacggatggtatatgggtacagaaattggcgcacgtaacctagccgatgaaaatcgctacaatatgttgaaaaaagttgcttctattttagggctggacacgacaaagaatgcgtcgctttggaaggacaaagccattgttgagttgaatgtggcggttctccattcttaccgagaagcaggggtgaccattgttgatcaccatacagcagcacatcaattcaaacagtttgaaaagcaggaagaaaaggctgaccgcaagctgactggggactggacatggctgattccgccagtatcaccagctgctacccacatcttccacaagcattacgacaataccattgtgaagccgaattatttttatcaggaaaagccctaccatgggacagaaaaagcctagcgagagctaggttttttgattaccttattcgaaaatccttataatgagctaactcagtgagcggctccatctgcatatctgtgacctttgaaaaagggcttccttttcgaacggtctttaagaaatcaagcaccttttgctgctcaccctctacctttaactcgacatgaccttcatctgtgttgcgtacccagcctttcatcccgcgattgactgcttcgccttgtacaaaatagcgaaaaccgactccctgcacccgtcctgtgacaatggcatgataatgaatcaatgtcatctctccttttttctcatcgtaccatagcatgtatctgaccttcacgcatcgactatgatttaattgtctaacgatgtaaaataataggcatgagacaaccaaaggagatggtcatcgtgggacagaagagatatgacatagtaggaatccaagtaggacaacccatcacgacctatgcgaacggaaaagaaatcaaaacagccatcaacaaaaagcgtattcatgagcctgtatatttgagtaaggtcaattttgagggagatagccaaggtgatttggttcatcatggaggatatgataaagccgtctgcgtctttccatatgatcattatgcttacttcgagcaatttttaggggttacattacaggaagctgcgtttggcgaaaatctgacagtgcgcaagctagtcgagacgaaggtgcgtattggcgatgtctttcaacttggagaagcacttgttgaagtgagccagccaagacagccgtgtgtgaaactatcttttaagcacgctaacatgaagcttgtcaaggaagtacagcaaacggggtataccggtttttatttacgggtgctgaaagaaggcatagtgccgcctgatggttctcttgtattagtagaaaaagcgccccatcacattacagtccatgaagtgaacgaggtcaaatatcgtcaaacaagtccagagaggctgaaagccgttcttgcagtagatgccttagcagatgtggtgaggaagtctttagaaaaacgaattcagcacatttaaaaaaagccgtacatcttatgctgatgtacggctttaagcgtttatgagctaggtttcttttgctcaagaagatttgcaaggaaatatgtttttaagctttgaagctttcttccttcatgcttggtcacaccaagcttctttaattcttcgacataccagcctttgctaccataatgcatgatagaaaactcctttcaattgaaactgcctgcattgtaacatctcaaaaaaggacgtgaaaagtgtgcaggggttaagaaatgaaaactgattctatctgcctatgatccatgtatatgctggaaataatcatttatgaatttggcgggttgagggtaacgatgatcatgccgaccgtcataatcatgatgacaataccaagataagtcatcatggattgttttttcttaatacctacaaccgttaagatgatactttctatcaaaaagataactcctatgatgatgaaccacatatcaaataagacccctttcgcatatctttgcctattttaccacaggcatttttgtttagtcgtgacagattcgtgaaagggaaacgaaaaaaacccctccagtgaagaaggggacctgctggcttacagcttcgttaaaataatgggttcgtcttttgtgatcacaatggtatgttcaatctgtgccactaggcttttatctggtgttttaaatgtccagccgtcatcagtctgataaatcgattcagcatttgttgaaataaaaggttcgaaggcgatcactgtgccattcttaaacaaagcattatcgaatggatcataatagttcaaaatatggttgggtgcttcatgcagatttttcccaatgccgtgtcctgttaggtttttaatgacggtaaatccttgttctttggctgtattgtagaccgcacggccaatttggttttgtcttttaccggcttttgcatgctttaatccttcgaggaatgcatcctctgcacactggcataatgcttcaagacgagcatcacctgtacctaatacgaatgaaatgccggtatcggaataatagccgtccagctctgctgagatatcaatattgatgaggtcgccctcttgtaaaatggttttttcacttggaataccgtgtgcaacttcatcgttcacgctgatacaagtcgtcccagggaagtcatattccttttcaggcgccgaattggccccatgctcttctaatattttttttccaatcaaatctaattcttttgtagacatgcctggtttcgcttggcttttcatttcttctcttgccaaagcgacaattcgaccgactttttttaaggcttctaactcatgatcatgtttgacaatcactgttcattcccgctttctataacttcattctattcaatagcttaccacattttacgcgaaaagagtaaagagcggaatgtcaaatgaatgtggacaaattggtatagataactagatgtgcatatgatatattttttatgaacatcatgaacgtttggtcatgatgaagacaaagggggagaaggcaaatggtgtttcagttttttcaaaagctaggcaaatcatttatgcttccaatcgctgtgcttccggcagcagggattattttggctattgggcgggaggatgtattcgatatcccgtttattcatgcggcagggaatgctatttttgcaaacttggctttaatttttgcaatgggtatagcgatcggcattgcaaaggatggtaatggggcagcggcattatcaggtgcgatctcttattttattttatcagctggtacaacgtcgattaactcaacgaacaatatgggggtattgggcggtattttatgcgggctattggcagggtatgtgtacaatcgcttcaaggatacaaaactgccggaatacttagggttctttagcggaagacggcttgtgcccattatgaccgcacttttcaccattctattagcagccgttttcggatatgtatggcctccgattcaaagcgggatcaatggtttaggggaatggattttaagtcttggtgcgacgggtgcagggctgtttggtttctttaaccgattgctcattccattagggcttcatcatgtgctgaataacttattttggtttcaattcggggaattcagcggggcaacaggggatctagcgcgattctttaaaggagatccaagtgcgggtgtctttatgaccgggttcttcccagtgatgatgttcggtctgccagcggcatgtctagccatggttgtgaccgcaaagcctgaaaagcgaaaagctacagctggcttgatgattgggatggcgcttacgtcatttattacagggatcactgaaccaattgaattttcatttatgtttttatctccactcttatatggtgtccatgctgtgctaacaggtctttcgctctttattgtgaacaccattggaattcatagcggcttcgccttttcagcaggagcgattgattacgttttaagctttggcatcgcacaaaaaccactcatgctgctcggagttggggtgctttatggcattgtgtactttgtcgttttctatttcctcattaaactgttaaagctcaaaacaccaggcagggaagatgatgacattgaagatattgcagccgatgatacgaagacggcaggtgcgagtatgcttgtagagggacttggcggcaaagacaatatcaccactattgatcattgtgccactcgtctacgtttaacagtagaagatacacatttattaaatgaaggcacattgaaaaaagcaggtgccaaaggggtactgacttcagggaaatcctccgtacaaatcatcattggaacgaatgtagaatttgtcgcaaatgatctccgcaaggaagtcgatcgagattgaaaaaagcgttcagccaggtcaaatgggctgaacgtttttttgtttgcgctgttcgatcaccagcacaatactgatgacaacaagtaaaaaccaagaactgattttcccaagatgtacgagagaccaagcgtgctgttgatttggatattgccatgctcctaaaaaggtggtgacattttcggcaatccaaatgaagaaaccaatcagcagaaatgagacgacaagcggcattcgaaaggtagaagagccaacctgaaacgagacggacgtttttcgaaacacgacaacaagcagcaatgtcagccaccacctgagatcatagaaccaatgatgcgtaaagaaattgagataaatgcacaaactgatcccgattgaaaaaaacggatggggccatgaacccatctgcacttgaagccgggacagtgcctgataaatatagcttgctacactcgcatacataaacccgctatagagcggaaccccaaagaccttcgtataagcttcttcaggataggaccaagaacccatatgtactttatacatttctaagccaattccaatgaggtgaaatagacaaatcaccttcagttcattcaatgtctccagccgaagcgtcagcatgagaatctgtgccaggaggcaaagcagtagaatgaaatcataccggtgaagaaaaggaatagccaccatctttgatagggcaagcgccgcaaagatcatgacagggaatagacacgacatcgcctgtaagtaagcaaaatggaataatgttttcatacaaagttaaaccccttcttattgtctgaaatgacttagacggttttagcaagggaaaagtttacctcaactagatattcatgaacaatttgtgaatatatatgtgaaaaagatcacaaattagaaatggcatagtataataagatcataaagagaatgtgaaatatttcacataaattaaaaggaggcatcatcatgtttacaaaattcttacaaacgaatgtatgggcagcggttatccttttggcagcaagactttatatcggatggacttggctgacatctggtataggaaaactaacaggcggattcgatgcatcaggatatttacaatttgcgatagctgaacctgttgtcaaagatggccatctagtgtatccgttctatgtatggtttttagaaaatgtcgctttgccgaatgcgggactattcagtgccatggtcatgtggggagaaatcttagtaggtctaggattaatcgttggattgttcacaacaaccgcagcctttttcggaagcgtgatgaatgtctctttcttactagctggtaccgtctctgtcaacccgcttctcttgctcattgccatcgtcatcatggcagcgaaagggaatgcaggcaaatttggacttgattatgtcgcaggtccagtcttgaaacgaacaatgaaaagaaagccgcatttagaagtggcttcataataaagaaaaagcatcctcagcttctgctcaggatgcttttttatttaggaatcggctttcatcaggttaatatgcaggacggtgagtttatgctgatttatatctgggtcatggccgacgataaattcaagctcataatctccagttcgatacacgtattttttctcttttgtctgagggatggtgctgaccgaatccgctggtccaagttgtttctttaatagggaaggggtcatcccgccgatatttgtttctttttctacatttgtaccgaaataacggatttcgtcaattttgccttttgcatcataatgaaaagcaaatcccggattccccatttcagcatgatacaaatcaaagctgctgtgacctgtttctggatatggatttcctagtttatgatgaacgtctttttttgtttgaacaccaatttttagtccttctgcatagtacggcatttgtcctttatgtgccagctcatacacgttgtttaatgtggttttcggaccttgaggaacggattgttctactgctgttttggtcatggcgtgtgctgagaccgcagggctgaaaccaattagggcggacgaagcgagtgaagcagtcacgacaaaagcggttgtttttttcaagataaatccctccttcttctttctatacccggtgcaatagcggtcaaacgtgaaaagaaccagctgatcagggatcggctggttcttaaaatgagaaagttattttgatgaagagctagattcatctttggcggaagaggaatcttcttcatcctgtactttctttgtatagtcatattgattgcggtcaatcggtgtaaagcctttaggcttgtagaaacggagtaaatcttcggtgacgatcttatcagatgtctccagcatctttttcaccgtttcattttcttgtgatgctttatcagtcggctcaattttctcgcctgttttgttgctgtaatagttattgcctacttttgtgtagtccttagagacgaagtcaccgtttctaaatggcacaagctctttgaagttcttcgataagatatcagaaccagacattaaatagttcttcgtatcatcgccgagcaggtgcagaagggttggtgcgatatcgacttctccagagtatttatgaatctgtccgccttttacccctggtacatgaataaagagcggcacacgcatgagctgcgcattttcataatctccgattttttgtcctgtcactttttccatcgcttcattgtgattttcagaaatgccgtaatggtctccgtacataatgacgactgtattgtcatagagacctgattttttcaagtcgttgaagaactgttcaatggcttcatctaaataatgagccgattggaaatagttattgacgacagagtctccgaagtcaccaggttcgaaatcggtatcaccttcatccattccaaatgggaaatggttcgataacgtaatgaatttcgaataaaacggctgcttcaagttttcgagcattggcatggattctttgaagaaaggtttgtctttcagcccatagttcttcgtatcttgctcattcatatcgtagtactcagaatcgtaaaatctgtcatatccaaacgacttaaacatttcattacggttccaaaaggttttcgtattgccgtggaattctgctgacgtgtattgatccttcttcaagatgccaggaagtgcttgatacgtgttttgcgctttgttaataaaaacagagccctgtgataatgggaatagcccagtatccatcataaattcagcatcagacgtctttccttgtcctgtttgatggaagaagttatcaaagtaaaacgtttggttgtcgtgtgccaatgaattaaggaatggcgtcacttcttttccatttactttgtaatcaatgacaaagttttgcagagattcaagagaaatggtgatcacgttcatgcctttcgctttcccgtaatacgccgggttaggatcagcgctgttcgcttttaaatagttctctacatctgtcacgtcatttgaatttgccagagcacgctggctgtttgatttcacattttgaatggcatcaaacacagtaaagttataagcacctaaatatttaactaaataattgcggtcaaacgatcttgataaaagctctggtcgatcaatctctgcggcgactaagttcatcacaaagatcacaacagaggacacaaggacgagtctaaacgattttgacttttgaacaggtacagtagctgtacttgtttgctgctgctttttcatgcggactgcgagtacgatcaaaatgattgtatccataaagtaaaacatatcagtccaacgcatgagtgaaaatgcactatcacctaattgtccgccattcgttcctgcctgcatcacggtaggcagcgtgataaagtcattgaagaatcgatagtacacgatgtttgcgtatagtaaaaaagacatgaaaaaatgaatcacaatgatagcggcaggctgccattttttcttgaacaataaagcaaagccaagaaagaacaagctggagctaataggattcacgaaaagcaaaatatgctgaagcacatttgatataccaagtttaaattcaattaaatacgctgaatacgttttgagccaaagtaagatggctgcaataacaaagaagccgaggcctcgtttttgaataaatgttttcataaaaacactccttttctccgatacacggaagaggcggaacgaaagaaaacgaaccattagaatataccatgaaatgctcaaatagaaaagtgttaaccggagaagagcgtcagcagcctgtccgagcaataaaagggaagaaaacgaaattattcgctcttcgaaaaactttttatgaaattcatcctattattaacagaaaattcagcaattttccagttgttatatcaataaaacgggtaaaaagacacaagtctaaagaattaatttggtttctacaatgatgatttagagagtatttccagtgtttcttaatgtttatgcaggttaagtaaaaaaaatgagaaaaagaatggaggaggaacatggatgaaatttcctgcgatgagatatatcaatatatttttttgtttcatcaacataatattttcgatgtgttttgtaagggttttatttattttaatgaatgaacaaattatctaaatatacttaagtgaacatttcgagactataaacttttaaattggggtcgatatagactttgacaggaaatcttccattgaaaggattgatagtatatgactgtacgagcagagaacctcgttcagaactggtttccgagtgaggacggaaatgcagcagagcgtaaagaactcatcaaattgatggagcagattgtttcaggggtcgatcacctgaaagatccgaaccgtgcacacctaaagggtgaaaagaatcgtggagaagatttttaccaaaagctcactgaaacaagtcaaattccggtgaacggccaacaagcggaacttgtgaatgaagaattactgaagcttttacataaccatccataccacacaaagtatttcttcacgaacattttgccaatggcaagtacaccaggaattctaggcatgctgacggccatgctggtaaatggaaacaacctatgggatgtttatggaccagcaggagcggaagctgaggtcagagtggtctcaatgatgtctaagctcatcggatatgatccaagtgtgagcgggggatatacaacatggggaggtcagggagccattttctcaggactacgtttagcgattgcaaaagttgcgccggagtcactgcgaaaaggtgtcccgcaaaatctttatgcgttttgttctgatgctgcacattacagcttatttaagtcaatggaagcaacaggacttggcacagacaacttgatcagaattaagacgaataaagatcattcgatggatatggaagatttgcgttgtcaaatggaacgtgttgcacaaaatggcggaattcccgtttatattgtcgcaacaaccggaacaacagatgccattgcaattgatgatgtaaaaggggtacgtgaaacagcagaagccattgctgaggagtatggtctacaggtgccgcatattcatgcggattcagcgcttggcggattctttgctttctttaatgagtatgatgtagctgaaaacccgctgcaattctcagacggtgttcttcgtatgctaaaagaaatcaaagcgaaattccagcatctttctcttgctgacacgatgtgctttgactttcaaaagctcggccaaacaccttacacatctagtttattcttagtgaaaaatgctgctgacctaaagcgtttagatctggaagaacaagagacaccatatgttggtcatagaggctacggcgaataccatacgggttatacactggaatgctcaagaatgggaagctctatcagtatgctgagtgtgctgttaacgtttggaattgaaggctaccagcgcttgctcggtcaattcctagaggtgaaccttgccttcagagaagcactcagtcaagaaattccgcaagcagaagtcgtgaatgatgacaacgtcggaatggctacattatttagaatttacctagacggctcaccgcgctttcaagaagaaatttcaggcgaagcgactgcaatggaaattgagcggaacaatgaattgaacaaaatgctgtttgaaaagcttggagagaaaagagacgaaatgttctttggcgatacaacgaagtttttacttgtaaatgcaaaagaaggacaagaattctatctaagtgttagtaagttttttgtcatctcaccttatacgttaccagagcatatcccacatatcgtatcttatttaaaagatgtgatcgcatctgtttgtggacaatttgaacatgtacatgcttaaatcaaatctgagagtggagatgtaggaaaaaatggcgaaacaaaggaaatttggaggatacacgatatcctctaaaatcatgtcagtcgttgtcgtaacattacttgcaaccgttgcactattcgttttaacattttatctagtcagccaggatttatcatcccagttattaaagcaatttgattatcgattaacaacagatattgatactgcaaagaaagaaatcgataatttggatggaaacgttcttggcattagcgggaaggatgatcccctttatgtggaggtcaaaaagaaattcaaggagcttcaagaagatcatacgcttgagaacttatacgtgctatctaataaaggcggcaaagaaagaattattatattaactggggaagaaaatgattttgatcaagattatgccttttcagatgagatgaaacaagcactttctgaagataaaatgatcaaaagtgatatttacaaagactcatttggtacacataaatcagtctttttgccaatcaaggattcaggcggtgagctgacagggattttaggaattgatttagatgcgtctgttgtgcctgaaacaacgaagaagctgacgatctatatcacggttgcatctgctattgtgctcatcggtgggttgtttttctcctttatcatgggcagaagaattgcgaaaccagcacgttcattgatggaatcagcgaaccgaattgctgacggtgatttaactggaatggtagaggttgaaagtaaagatgagatcggtcaacttgccgcatccttccaaaagatgcaagggcggatcaaagagctcattgcgaagatctcaaactcatctagtgaagtgtcgaaaatgtcctcacagcttcgcaccgtaacgaatgaatcgagtcaaagtgcgcagcaagtgtcagaagccatgacgaatatgagtgaaggaatcaatgattctgtcgcaaatattacggattgtacaacatccgttgcagagatcgatactcaaatcgaaggtgtcacaaaagaagtcgatgaaatgaaatctgtttcatctgacgtacaagagcagtcagaatctggtcaaaaactagtgaatcatgtgcttgagcatctgaatatgttacatgacaagatgaccaactcaaagcaggcagcagaagaattacaatctcattcaacggagattgaaagtgtcatctcgattattacggacatttcagcgcaaacgaatctgcttgcactgaatgcttcaattgaagcggcacgtgttggagaagaaggaaaagggtttgctgttgtggcagatgaggtgcgtaagttagctgagcaatcagcggatgcggctaaaaccgtttcagacctcgtcatcggcacacaggaaaacagtcagcgtgttcttgaaagcgtagaggaaagcagtaaagcagtggaagaaggacgtgaacaaatggaaggcacgtcacaaaacttcgctgtgatttacgacggcgtatctcagttttcaagaagaacgaacaatttgcttgcttctattaagcaagtagagcaagcatatcaaacgatttctacatcgattgaacaaatttcggttgtatcggaagaacacgccgccagctctcaagaagtagcggcagcaacagaacagcaaagtgctggcatgcagcaaatttcaagtgcgattgaacagctctctgatatgtcagaggacttagcacagatggtttctaccttcaaaattgacaataaataacgagaaagctgactcttgtgagagagtcagcttttttgctatgcttaatcaaatcgtttcagacgaaaggagaaacgccatggattttgcgcagagattatcagaagaacggattaaaaaagcgatggatcacggggcttttgaaggattatctggctttgggaaacccctgcctaaagatgatgctgctcatgtacctgaagaactcagaatgggctacaggatgatgaaaaatgctggctttgctggggaagaaacagcactgaaaaaagaactcatgaccgtcaaagagctgcttcactccagtatagacggagaggaaagaaaaaaactttctctcatatgtgaagaaaaacaaaaacgcctggatgaactcgcatctaagcgtcaaacttttgcccgtccagcctcctccttttataaaaacagggtctacgaaaaattaacggagcataaaaaaagatgatgacacgctgcctctcctgagcacattgagggagcttttttatgaaagcgctacattttgttgttgactacatgtatatacaaatataaaataagaaacaaacatgtatatacaagttttttggttcttttttcttataaaaaacgatctcggaggggatagcatggctgattatcaggcagcagcagatcagattgtgaaagccatcggcggcaaagaaaatattgatcaagcgacacattgtgtgacaaggctgcgctttgtactgaaagatgaaggaaaggttgacgagaaagcacttgaacaaatagaagaagtgaagggatctttctcagcgaacggtcaataccaagttgttatcggccaaggggtcgtcaatcgggtatatgccgaaatggtgaaacagacaggcattggggaagccacaaaagaggacgttaagcgtgcctctgatcaaaaattaaatccattgcagcgtgctgtgaaaacgcttgcggatatctttattccgattcttcctgccatcgtcacagccggtttattaatggggattaataatattttaacagctccagatattttttttgatcaaaaatcgattgtggatgtgtatccggcatgggctgatttagcgaatatgatcaacttgattgcaggcactgccttcacattcctgcccgcattaatcggctggtcagcagtgaagcggtttggaggaaatccgctcttagggatggtccttgggctgatgcttgtacacccagacttattaaatgcgtggggctatggagcggctgaaaaatctggtgagattcctgtctggaatttgtttggacttgaagtgcaaaaggtaggctatcaagggcaggttcttccgatactcgttgcctcgtatttactagcgaagctcgaattatttatcacaaaacggacacctgaaagcattcagctgttagtggttgcaccgattacgttattagtcattggctttttatcctttatcgtcattggacctgttacatttgcgatcggaaacgttttaacatctggacttgtggctgtattccagcaattcgcagcacttggcggtctattatacggcggattgtacgctgcattagtgattacagggatgcaccatacgttcctcgctgtcgatattcaattgattaattccaaactgcatggcacgtttctatggccgatgctcgcactgtctaatatcgcacaaggatcagccgcacttgcgatgatgtttgttttaaaagatgaaaagcaaaaggggctctcactgacatcaagtatttccgcttacttaggaattaccgagccagcgatgtttggcgtcaacctgcgctatcgattcccatttatttttgcacttattagctctggtttagctggtatgtttatcgcctctcaaggggtgctggcaagctcagttggtgttggaggcattccaggaatcttctccattatcccgaaatattggggcgcatttgcgatagggatggtcattgtactcatcgtcccgttcattggaacccttttgtatgcaaagctaaaaaagaagaaagatgtttcacaagaacttaactagtggtggtgaaggaaattgaaacaacaaacaaacgaaccgtggtggaaaaaagcggtggtctatcaaatttatccgaagagctttttagatacaacgggctcaggtacaggcgatatcaatggtgtgacaaaaaagctcgattatattaaagagctgggggcggattgtatttggctcacgccaatgtatgagtctccgcagcatgacaacggctatgatattagtgattatacaaaaatccatgacatgtacggcacaatggcggattttgaacacatgctgaaagaagcccatgatcgaggtatacgagtcatcatggatttagccgtcaatcatacatccattttccatgagtggtttcaagcatcacgcgagtcaaagaatcatccttatcgagattattatatttggaaggagcctaaagcagacggatcaccgccgaatgattggcagtcaaaatttggcggtccggcatgggagctagatgaagcaacgggagagtattatcttcatttatacgatgtcacacaggcggatcttaattgggaaaaggatgaggtgcgcaggcaagtatatgacatcatgcatttttggtttgaaaaaggaattgatggattcaggctggatgtcattaacaacatctcgaaagatcaacgcttcttagatgacgccggacagtctgtgcaaggagacggccggatgtattatacggatggcccaagaattcatgagtttctgcatgaaatgaatcaagaggttttttcgaaatatgacagcatgacagtcggggaaatgtcttcaacgaatatcgcagactgcattcggtatacaagaccggatcggaaggagctggatatgacgtttaatttccatcatttaaaggtcgattatccaaacggagaaaaatgggccctcgcaccatttgattttcatgaattgaagtcgattctgtctgagtggcagacgaaaatgcatgagggcggcggctggaatgcgctcttctggtgcaatcatgatcagccgcgtatcgtctcaaggtatggtgatgatgacacgtatcatcagcaatcagcgaagatgctggcgactaccattcatctcatgcaagggactccgtatatttatcaaggtgaagaaattggcatgaagaatcctcgttttgaggacatatcgtcttaccgtgatattgaatcacttaatatgtatgaagccatgcttgaaaaagggaaatcaaaggaagaagcactcgccattttacaggtcaagtcaagagataatgcgagaacaccgatgcagtggacctcagaaaagaatgcaggtttctcaaaaggaacaccttggattgagccagccaataacgacatttcagtagaagcttcattaaaggatcagtcgtctattttctatcattatcaagcgctttgcaggctgcgtaaagaacttgatgtgatcacatatggaagcttcactttactcttagcagaagatccgaaggtttttgcttatgtcagagaaagccatgaggagaagcttcttgtgatcaatcatttttatgcaggggaggcggactttacgcttcctgatgagctcgtgcaggctatagatgagatggaggggcaagtgctgttatccaattatgaggatgtaccggcagatatgaagggatttacgttgcgtccatatgagtcaatcgtttatcatttaaccaaacgctagaaaatggggcggagggaaaatgaaagagaataagtttcgagtgatttatgatcagctcgcaagacgaattgaacaaggtgattggcaggataaaggcattctgccatcagagcatgagctatccttgatgtacgatacgtcccgtgagacggtaagaaaggcattaaatatccttgtgcaaaatggctatatccaaaaaatccgcgggaaaggctctgtcttgctgaatcgtgagaaaatgcaattcccagtctcgggtctcgtcagctttaaagagctttcccaaacacttggccgaaagacagttacgacggttcacgaatttggtttaatcaaaccggatcagtatattcagtctcagctgaaaataagtggacaggaggatgtctgggaagtcatccgctctcgcaatattagcggagaagaagtgattttagacaaggattactttttgcaaaagcatgtgtcagtcttgtcgaaggacatttgtgaaggatcaatctacgagtatattgaaggagagctcggtgtatcaatcagctatgcccaaaaggaatttgtggtagagccatgtacagaagaagacgccaagtatcttgatttgaacgggtttgaccatgtcgtcgtcgtgaagaattacgtgttcttagaggatacaagtttatttcaatacacggaaagccgtcaccgattagaccgcttcagattcgtcgattttgcaagaagagaaaaagtggacagagcataggctctgtccatttcaggttttgggagaaggagagagatagacgacgaatagatcaccctttttaggaggaaagatgattagattaaatagaccactaaaattaagagatttagaaatattcagcgtgatgaaagatcatcagattttatgttatgtcatcattgaagatacgcgaaaaccgtttacggaagaagacagaaagctagacccattatgttatatggatgaagaagatatacaagcgtatttgaatgtttttcatatttccattatcaatgatgagaaattaagtgaagaggatttaacgatggtaaaaggtttttttgctgatttagtaaataatacgaacttaacgaattttattacgagagattatgttttaaagaatttatatgatgtcgaggatgaaaatgacatgatgttctttaatagaatgcttcggcatatagggtcagatgatgtgaaagaatttgacgaccgcaattggatctatttatctcaagattaatgactattccatgaaaaaaggacagagcctatgctctgtccttttcctttaggatgatacattttttcttgtacgcttgcgctggtagtaataaaggataccgcctgcggcgagcatgagcacgccaatcagtacagctgtatacatcatcgtggctgtattcggcagtgtgccgcctgggaggccggttccttcttggtttggatctgtgcctgtacctccgcctggtgctgatgtttcgccgtctccaccattttgatctggggttgttccagctgctgcattttgattgaggacggtgtattcgctaaagtgctcagtttgacctgatacgactccattttcgaacgatccgttacttgttttggcgtaacgattcttctcgcgatccacataatacacaccaggttttttcgccttttgaggctcgtctagtgtaaaggatagtgtgacagggtctttaaaggtcgaaacctttttcatgtcttgtttgatttggaaatcatacgtatccgttaatgcgtttttcactttatccgtctttatcatccatatatctgcgcttttctcggataaattcgagagcggcaatgcgagtcccactttgtcatgatagatggtcacgtttggatcttgctctcttttcttcagctcggctacttgcgcttttgatagagacaattgaacgtttttcgctttgcttgctttgtctaaatagagaaatgctttgtttgtatgctgcacatacgtttggaatttcttatcatcttgaatgtcataagcgccttttcctttcacgcgaggaaggaacacttctttcaccctgtgatcgatgacaggcgaaatctgcccgtctgccttttcaatttgctctttgaagatttcatagtcgacatatcctaagtcttcgccgtgagaggcttctgtaaagacgctgtagccgtcgccgcctgtgccgacaaatgcgtttgtggctacgcggtatgttttctcatcatcaatgtctgtcagttgacccttttggtctttcaatttcacatcaatcagcctgctgccagctggtttactgagtgtaaacgtatattcaatgccagctacatgagggaatgcacctccgccttcctcaatgcctgacagcccctgttcgagtgcttttttaatttgactgccttttaaatctgcgacataaagtgtatttccgaaaggcatcaccgttaaaatatcacctaaagtgatatctcctttttcaatgctgcctcgaataccgccgccgtttgtgatggcaaggtcagcatcggcagattcttgtgctttctgcagcatgccgtcggcaataaagttcccaagattcgtttccttcgcacggacgtgctcgcgttgtccgtctaataggacatctgtatagccgactttttctgtttttaaatcttgaatatctgctttgtacccatcaaggatcgctgttgcatctgcatcttctttgacagagtcatcaatagagatcaggtcaaaagaagattcttttggctgtacgacgccttttttgtcaaaggctacgtctactttccctaaaaattgtccatagtctttcacctgagcgacaattgtaggttcttttttattgatgacctttaatttttcaacaagtgtgtgcgtgtgaccgccaatgattaaatcaataccgtcaactttttgagccagctcaaggtcacgattgtagccaatgtgtgttaacgcaatgattttattgattttttcttctgtttgaatggtgttgactgtttcttttgctttcttgtacgcatctttaaattgaatgttaggaccgctgctggatgtaatggctgtgtcttcagtcgttaagccgaatacggccaccttttcaccattaacatcaagcaggatgtaagggtagatcccggcttcttttttctcaccagctttaaatgaggctggttttttcactaagtcgctcaattgtttttccttcgagacatccacgtttgatgacacaatcgggaattgaggcttttcaaattgatgacggtttttcggatcgacatctgatgcatcacctgtcagaaattgacgtagtacagaaggacctttgtcaaattcatgattaccaaacgtcatggcatcgtatttcattaagttcatcaatttcagatcggcaagtccttgccattttgtgaagtataggtcaccagagaagacatctccagcgtccaataaaatattgttcttgctttcagcacggatttctttgatctttgttgcgcgtcttgccgcatcatcaaggtgtgcgtgtgtatcgttcgtatgcatgactgttaaattccagttgtctgatgaaggcggttctgttgtgccatcctctttaaaggctagcttgtacacaccaagaccatctgtgcttgcgttacgaacaaagtctacgctgcttgatttctcagcaaacggtttggctaaaagagaagattcaaatgttaaagttgcgcctttcaccggtgcaatggcccagttttgatctgcacttgggttgatggttttttgttcgataatataatccatcagtacttggcggttctcatctgctgaggcaagcaccactttatcttgggtcagatgcggaaagcctccgccgccagaagcacgatagttatttgtcacgactaaaaattcttgattgtcagagactgttttcccgttgtaagacaggtttttgatgcggtttgcattggcgttgaccagtgtgcctgttgtgctgtatttagcaggctgcgtcacatcgacttggtatgtcacaccatctattacatcaaagttatacgagcggtattcctcgtttaaaatcggctgttcttttgaaacgttcggtttgatctgattaaactgtccggcagacatttctaaccagtctttcacttcactgcctctcagtttcacaatctgcacagtgttatcgtaaaggtagagatcgccgatgttcttaatcgctaaatctccttttgcgatatttgtataataatttacaccgtttcgtccgcctgctttaaacggcgcacctgcagataaaatcggtaaattttgatacgcagtgtccttcattttttcttgtgcataccatttttgggcatctgtcacaatttgaatcgaagggtcatccatcacttgagcgaaaaagctattaatgtctgcttctgtattgccaacaggctttctcacgtaatcaagtgtgttttgatgcgttgtttgaatggcatcttttactgtgcttttctgagatgatactccggcaacagattcgatcttgcctgttccgtcggtgaccttccagctgctgccgtcaggctctagtgttaaatcaatgactccgaggtagctgccccagttttttgacatgacgactgggatgccgttgatggttccttttgagacatcgaatttgtcaacgccgttatattcagcgcttgggaatgtgccatgctggtgcccagatacaatggcattgatgccttttgttttcgtggcaaggtcaaagatcatattttctgatcctttaggtgaagctgttttttcaattcctgtatgggcaagagcgacaatgacatctgcgcctttcgccttcatttcaggaatggtttcattggcagattcgacgatgtcctgcacttggacttgtccatctaaatgcttcttatcccacgtcataatttgtggtggaacaaatcctatgtaaccaactttcacagtttgtgaggctccgtttgcatctttaaaggttttatcttggatcacgtaaggtgtaaaacggtgttctccatttagctttttgacgttcgcattgacaatcgggaagttggcgcccgcaatggtaccgtcaaggaaagataatccgtagttaaattcatgattgccaagtgttcctgcatcgtattttagtttgttgagtgtatgaataatggggtgaacctttgtttgattgatgatgctgtctttctcatgtttgtaaacgtattctccaagaggggttccttgaatcaggtctccgttatcaacaaggagtgtatttggattttgtgaacggtgcttgtcaatcagctcggctgtttttgccaagccaaattcatttgtttctttgtcgctgtaataatcataattcatcatgttcgcatgaacatcggttgtggctaagatgctgacctttacggctttgccgttttctgtttctgcatgagtaggtactgctgggagaatgagactaatcatcataatggaagtgagcagaatagacaggtttttccttcgtttagacctatgtgtttgcttcttcacctgatctccgcctttctaatttttttgaccacaatacctattgtagaaatgtttcgttaacttttgtagttattttttgcagattattgtaaagataacataaatcatacgaattaccttgttaagggaatgcgaatgagtcgaattgcttatttttatcataaggggttttctgatagggataggatgtttcatttcaacatgcccgggtatagtgtgtagtgtaaacgataatcaagcaggagggtttctacatgggtaagaaaattgcagttgtattaacagattactttgaggatgttgaattcaccgagcctgcaaaagcctttaaagatgcaggccatgaaatcacagtgattgaaaacgaaaaaggaaaaacagtgaaagggaagcaaggagatgcagaagtgagagtggatgcgtccattgatcacgtgaagcctgaagacttcgatgcacttctgattcctggcggtttctcaccagacattctgcgtgcagatgatcgttacgtccaattcactaaaacatttatggatgagaaaaaaccagtatttgcgatctgtcacggaccgcaattgcttattacagcgaagacgctggaaggaagaggcgcaactggctatacatccattcaagtagatatggaaaacgcaggcgctaaatttaaagacgaagaagttgtcgtttgtcaggatcagcttgtgacaagccgtacacctgatgacattccagcatttaaccgtgaatcattaaaactgcttgagaaataaaccgcagttatgacaggataaaaaaagccagcaccttaaggggtgctggctttttctgcgcatgatgtaaggaaactgcgtgaagaccgcaaagcagcttcctgatgcaccattattttcttaagttttttagctcgcttgcgatggcttgcatttcacttgggctgaatgaagattttttcatcaccatttggtgaagaaattcgatatcttcgtacttgtctggactgaagtcctcggctttgatgactccaatgttcagcatatttaacttttgcgaaatgtcttcaatcagctgattgacttcagccgctttttgctctgacaagggcggcacgtcctttcctgcatatatgtcgaataatatgtctattttaacagaaatgcaaaagaataaaagggctattaagatgacacggagatgtttttctcctttttctcctgcttaatcttatcaatgattcgtttggattcaaatacgacaacccctgataaaccgatgagcccgattaagtttggaatcgccatcagcccattgagcatatctgccacaccccaaacgaagtcatttttaaacacggcaccgaaaaagacagcaatgacaaacacgatgcgataatacatgacgtacgaatccttcgccaaatatgtaaagcatttttcgccataataggaccagccaatgatggtggaataggcaaacaagagcagaccgattgccacaatggttgagccaactggaccgaggaaatgagcaaaggataacgaggtcagcgcatcacttttcactgttaaatacatatctgccatgacaatggtaatgccagtgatagaacaaacaatgattgtatcgataaacacttgcgtcatagatacgagagcttgacgggcaggcatatccgttttcgcagccgcagcagcaattggtgctgacccaagacctgcttcattggaaaatactcctcgtgccacaccccagcgaatgacagttccaattgcaccacctgccacggcttgacccgtaaaggcatctgagaaaataagaccgactgcgcctggaacgagatcagcattcatgacaagaatgatcagaccgcaaatgacgtagaataaagccatgactggtacaaaaatagatgtgacccggccaatgcttttaattccgcctaaaatcacgagtgccgtaaaagccgtaatgatgatacctgttacccatgttggaatttgaaaagtagaattcatgactcctgagatggaattagactgtaccaggttgccgatcccaaaggcagcactggcgccgaaaacagcaaatagaacccctagccatttctgtttcaatccatgctctaaataatacataggtccgccagacatttcgcctttttcgtttttgatcctgtatttaactgcaagaacagcttctgcaaacttagtggccattccgaaaaatgcagcaaaccacatccagaataccgcacccggaccacccgctataactgccgaggccacacctacgatattccctgtaccgacagttgcagcaagagccgtcattaacgcttggaaatgagaaatatctccttctgacattttgtcttgtttagaaaaagcgagctttaaagaataaggaagtaatctaatttgaatgaagagaacgcgaaaggtgaggtatattccagtaccaacaattaaaatcaataggggaggcccccacaaaaaattgttcatcgtcgtgacaaactgctcaattattcccatctaatatccccctttgtttgtgtaattctcctaaagtttctcctgtttttgtgtaatttgtcaatggcgatgagagcttttcttgcaaagtttccaaaagaaaaagggcttgatatgatagagaaaaggttttcgaaaagaactcttagggaaaagataggaggagaatgaagaatgattcatgtgttattcgtgtgtcttggcaatatttgcaggtcaccgatggcagaggccatgtttagaaaaagagtagaagatgaggggcttagcgagcactttgtgattgattcagcagggattggcggctggcatcaaggaagtcctccgcatgaaggaacgcgaaaactgcttgatgaaaaaggcatcagctatgaaggaatgactgcaagacaaatcatggagaaggatatcaccacatacgactatatcatggcgatggatgcagaaaatgtaggggcacttcgcagtatagccggctatgggaaacatcactttattggccgtcttcttgattttgtagaagacgacgatcgagatgatgtgccagatccttattacactgggaactttgaggaagtccatgaattaattgaaacaggaattgaccgttttttgacgtatgtaaagaaagagaaccacctttaactgaaaggagatcagacgagatggaagaaaaaaatcaaatcgtgctccgaggagctgtcataggagcagcttgcggcgcattgctgactttatttcatcggccaacgagaattgcactcaaagacaaatggaatgactgccagcaaaagctggatgaataccgccaagagccaggcagaatatcggcttgcatgaaagaaaaaatggaagaaacgaagcagctgatgcgaacagtctcagatgatttgtcatttttaaatgaacaggtcaatcagttaaaggaaacaaccccaagggtattagaaattattgaagaaacaaaggatcactttcaatcgaaacagacagattgatcattggagatgaggcgtatgggttttattaaagcgttaattgaacgctttttgctgcatgaaggaccggcaaaatctgctgagcttgcgtatttctttttgctttcattatttccgtttctcatcttcgtgctgacactggttgggtatttgccgctgacgtcaaaggatgtcctgagcgtcatttctggttatgcgccagaaggagcgctttcgatgattgaatccattgccgatcagacgctgaataatcgtaacggcgggttattatcgttcgggattattgccgccctttggtcagcatctaacggcattaatgccgtcgtcagagcttttaaccatgcttacgaagttgaggagaatcgttccttcattctcgtacgtttaacatcgattatcttaacgatcgcgatggttttgaccattatttttgccttgatgctgcctgtctttggaaaagaacttggtttatttgtcgctaaattagtcgggcagtcagatgcctttctcaccgtatggactgcgatgagatggatcattagcccgctgattttgttgattgtttttacatccttgtactattttgctccaaacattaggctgaaattgaaatttgttctgccaggtgccatttttgcatcgattggatggattttggtcagcatgctgttttcattttacgtaggcgagtttgccaactacagtgcgatgtacggaagcattgggggaatcattattttaatgatctggttttatttaaccggcatcatgattatccttggcggcgagctcaatgcgcttttacataaacgtaaaatcgtaccaggcaagctataaagaaatccgggcatcctaaagaagaacgaacaagttcaatctgaatggatgggggaaatcacatatgtccaaacaatcgaaaaaaggcggaagcaatacgaaacaaaacaaaggtcatcagcctaagcacaaaacaagcggcagtgcgaacgggcaaaatggatatcactaaatgaaaaaactcctctgcatagcgcaggggagtttctatttcacgatcgtatatatcgcttaaggttaaaagcggcatcaggctttgactgatagtgaggatcgagctggaatccagcattcatcgctacacgttcacttcgaacatgacctacaggacaaaaaatttcaaatccatcgacttttgtagaaaatatttctgtcatatatttcacgatcgttgtcacaataccctgaccttgtgcgtcttgaccaatccaataaccaatattgcctattttctgatcaaacgtcagacggaacaccccgataagttgatcgttcagcttaatgccagcttccaaccctttttgttcattgtaggtagtttgagtcgattgaataaatgttctgacatcctctatgcttttgcagtgatggacccatggaagccattcctctaaatgagcctgattctcttgaataagtttcaataatgtgtccgcatcatcaaattgtagagatgtcaaagtcaattcatttgtgatgtcgtatgtaaacaaagatcgtccctccattttaatgactttcaaccactgctgccgttcgcccaaatcgaacgcagaaaaacacgaataatatcacgatgctgacaaggtaaagtaaattcattccttcaaacgtttgcacaaagattccaccgagaacaggcccgagaatactccccgcactaaacgccatcccgcacatcaaatttccagcaggaagcagatgctttggcaataagtcggtcatataactgatgccaagtgagaaggtagagcctacagccattccggcaataaagaaacaaatcgcaacagccaaaaccgattgaatgaaaattcctgctagtaggaaaaagaaagacccgacgagtgtgacacataaaatgatgcggcgcctgccaaaccggtcgctgagcatcccgagaggtagctgaaagacaatacttccaatggcaaacgcaggtaaaataaacgccactgcatccactgttatcccgcttctaagtgcatacacagggaagttgctattgagtgtcgtttctaaaaagccatagcaaaacggcatcataaaggcgacccagccaaattgaaaggctttcttaaagcgcttcaaactgtttgtctgctctgacgtctgcacttcgcccgtatctggatatgtatttttcaaaacaaaaacaagcagccaaatacataaactaacggcaccagaaacaatgaaaggtaaagatgggttgatttcaatgagtggtgttaaaaaaggtccagcggcaaaaccgagtccaaaggataacccatacaatgaaatatttcgcccgcgatttctcgatgacgacgcataggtcacccacgtctgtgtagagaaatgcagcatatgatcaccaatcccgatcatgagccgcaggaagaaccagacgacataagattcaaaaaacacaaagctaaacaagcttaaaaagacagcagcgcccccaatgacaattaacggcttaaacccaaaccggcgaagcggcgcttccataaagggagatgctagcagcacgccaagatataagcctgtggcatgcagaccgtttaacgtaggagaagtgccggcatgttcaaaaataatcgaaatgacaggcaataacgctccctgcgaaaaaccagatacagatacaagtaaaattaaaatcataaagtgaattctcgacataagaagctccttacaagttcatattttcatcgtacaatggaaccataggggtttcaatagaaaggtggaaaaggaatgaaactgatatacgaaacggaccggtggattgcgggaacagatgaaaagcagctgtatatctcaggaaaagaagaaatggggtacaggccatctcaattgttcacctcagctattgcaggctgctttggagaaatgctcattcatgtatgccggaaaaagcgaatatcctgtgaagggctgtcgatcacacctgaaacgacaagagcaggagctgtaaacaaaatctcccgtattcatttacatatcatttttgaacacatcaatacatctaaagaacaaatagataaagtcatcacaattgctttgaagcattgttcgatggtgcagtctgtgaaaggaagtattgaggtcaccttctcacacgaacgaatctaaatgtatatgatgccggcactcacgaaagaataacaatcagacatatgtaaaggagaatggctgtatgaatcgtttgtttcttgtgattgtcgcaattggtgtgccgctatcggtcattggcagttttcttcatttcccgcaggtcatcatgtttgccgtgtattgtatcgccattattggtcttgctagttttatgggaagagccacagaaagtcttgccatcatagcgggcccaagaattggcgggcttttaaacgccacatttggaaatgcggtagagttaattatttcattttttgcattaaagcaaggactgacagctattgtacttgcttcattaactggatcagttatcggaaacttactgcttgtggcggggctgtcttttttcgttggcggattaaaatataagcgccaagtgttcaatgtccacgatgcaaggcacaactcgggcttgctcatgtttgccattattgtggcgtttgtcattccagaagtgttttcggtggagatggctgaggataaacaatttgttttaagcattggaattagcattgtgatgattttgctttatgtcgcagcgctctatttcaaactggtcagccaccgcggagtctatgttgccaagctggagagcatggacggggaagcggagacggaagaagaaacacctgaatggtctggtaagtttgccactgtgattttgctgcttgcgacgattgccgttgcgtacatttcagagcgcctcgtccatacatttgatacggtgggagaacaatttggctggagtgagctgtttatcggagtcattattgtggccatcgtcggaaatgccgcagaacatgcctcagctgtcatcatggcgtataaaaacaaaatggatgtcgcggtggaaattgcttttggctcaacgcttcaggttgccatgatggtcgcgccaatccttgtcatcagctctctttttttcaataagcagatgccgctcattttctctttaccagagctcattgcgatggcatccgctgtgttactcacggtcattttatcaaatgatggtgatacaaactggtttgaaggcgccacattacttgctgcctatttcattatggcgattggatttttccttttataatcttttgtggataagggacgtctttgcggaaaatactatggaaaaatgaatgagaaagagtgatgatatgaaaaagatgccccgcatcatgtttgttgttctcttatccttaagttttctatacagctttccagcggaggcggcgaagccatttaaggtgccatcgtctgtcgctagtatctcaaaggagaatacgtatccgaacgcgtcacaggatcagcccctgctccagccgagcgagctgacagctgaattgttcaaaacaacgaatgtaccgattgaaaatacccatttgatcaaaatgctgaatgaatccagcatttcagggacgccattagcggttggataccgcgcgaccattttccttggaagatgggcactgagctacgattcaaacgaaacggttgccaactgggaatacaaaaaagtgaatacgaaccacattgataatagaggcggcaacaaaactgccattggaaaatacgttcaaaagcagcaagtgaaagtgagcggcgggctcacagcaaaggtgccaaacccggaagatgtgaaaacattgatgatgctaatagccattcaaaaaacaaagctgcccctcgcttttgacacagtgattggcgcaggaacaaaacgagatcagtcgtaccatgtatctccgaaaaaagcagcttcgcttcatgcctatgcaccagcgattaacgaaaaaggaaaggtgacatacggagaagtgtaccttgtgctcaaaggaaataaacgcaaactcgtcgtaaaaaacgtgacctcacaaggaatcggcgcttggattcctgtgcaggatcacctgacgtttgggtttcaagggatgaattaacatagtaaaaccccctctttcactatagaagagggggtttaatttgtcgtaaagttattaatgtcaggcgtgatataaaactctatgatggccgagaaaaataatagtatagttactagcacaagccctgtacaagtaattttacatatatttttaaaatttattttcttctttttatcaaacaataaaaggatggcctctttcagaaggataaaaccaataccaccagaaatcataatagccatcaattcgcttataccatgaggtaagatgagaagtaatgattgtaaaggatgcattaaatacggaatcgaaattttaaaagctccaccaatcattaatccattgataaacaatatgtatacactagataaaccaaaagtaaccattccaactatcatcatgatacatatagataaattttgaaagaaataatcaaaaaaatgacgttgatcatttattctaacaatatcctctgaataatctccgtttgtcatataaaatcccatgaccattccaattgttatgaagaaaatagaaggtaaaataagcacttttaaagcatggtaaaaatcttttaagtaactcttaattgctttactcatcagtaaacagctcttttaaattttctgtcgtcacgtttgttaattgctgattccgaagaagatatgtagagtgactgagctcttcaacaaaatctaaagtatgtgatgaaaaaagcacacttccaaattgaagaaattcttttagcttctgaactaatttaatacaactagatggatctagcccattaaagggttcatctaaaataagtaatcgaggttttaataaaagagcaagtgaaatagctaatttcattttcattcctttagaatagtctctaattaatttgttggacaggtagtcaagttcaaagaatgaaagcatagtattgatttctgttgagtctaactttttgttgtagagtctagaaacaaaattgatatactcggatgcagttaagtattcatatacaagagaatcatcaggtacaaagaaaaggtgacttgaataatgacgatccttaggttgcttatctaaaaagcggataacgccatcatcagttaatcgtatgccacaaatgatctcaaatagagtcgtttttcctgcgccgttttttcctataataccaacagaatcatgtggcttaacatgaagagacaaatcatggagaatggatttgttgttaatttggacatgaatattatctaactttaacattttacttcccctttttacttacttaaattaagaaattgtatcttaagactagagattttcaaaataataaaaataaatatcaaataaatcaatgtagagataataaaagcaaggtaatgctgtttatcaaatatgattagcatcagtccttccagcaaaaaacaaaatagaattagcaaattcgcagtcatttttgctttgcttgaaggaagattacttacaaaatttcttttaaattctggataactaatgcttgataagaaataaatacaattgaataagatcatttgtgttattgccataacacaaatgaaaataaagaaagggaaagacatttgaaatatgattgcagctattgtaaaaaggataatgaacagcgtgatattaattgaactagagagaataatgtgacttcgtacgatgaatttgggatgaatcccagtcaatttcagaagttgaaaacgtgcaccatgaaaatcgatgcttgcgagaaagcaatatgtatctgataacattttaacaatggcagctgacagaatgataaaaactaaactctcattagcattcataaatgttggtattctataataaagcaaatataaaataagtatgatagaaaatagcgagctaaataaaggcaagtatgtcataataatttcttgttttctttgtcttttgatgtaagcaatcattaactggatgagagacagctcctttctttcatgaaaggaaaggtgagaaatcattgttttaacctttcttttttttgaattttcaccaatgaaatgtgctcttaccccattagaaaaagaagttcgaatcaataacataacgatgattaataatgaaatttgtaaaaaaatgatgaatttatcttggaaaattgttggtaaaaccgcaaaaggcatttgggatatccagttgaaaaaccaattaagcattgaatgagattggaaatctattttgttggataaaaaaataacagctaatatagacaaaacaaaaattctcagaattgaaaaaaacaattggtatgctgtcgcaatataacggtacccaatgacagataagtagaaaaccgcaaatttcattatataaagaaagcatacagagttaagtgtaaatacaatgcctaaaaaaaccgaacctatttgtgaataatgatataaaaaaattgttggaataagaattgaagagattaaaacctctttcaaaaatgtggtttcaaaatattttgctagtaacaactcgtgaaaagaaagtggtgatacaattaataatttcaggtcattttttatagatgttttataaacagtatttgtaatggattgctgaattcctgttaataaaaaagtaatgatgaaaaaagttgatatgtaaaagatctcgttatgtgaaaataaatgattggtatataattgagtcattatagtggtaaaaactgcgctgaataaaagaatgacggatagagcgacataaacaaataagtcattctttatttttaattttggaagtcgatagtaaaaaaaagatttttgtctaaaataaatatatgttagtacatttctcattagaaaaatgaatctcctttatctaaaaatatgagttatatcacttccgaaaaatataatacatacctcaatgattacgaaaattatcgcaatagcaattaatttttttattttcatgttgattagtacatgaaagccacatattaacaacatatatctccagatattaaagggatttatgataaagatggcaagggctgttagaaaatgatcgtactgagatatattggtgttatctaaaaatggaaagaataaaaggctgatggcaaaaaagatttttggcatttgactaaatccataaattgaaatggtcgttttgaaactgatttctctatctaacataaaagtatttaataacaaatagatggtaaaagaagtaatgaaaaaagtcattaatgaaaaaaaactcatacctaaagctattaaatataaccacttgctttccacatgttcaaagcgttcaaaaatgacttgaatataaagtaagggtattaaagcagaaaataataatggaagagctatgttaggttttttattaagagagtacatcaattctaatggctgataaaaaatcttgaaaaatctcataacgtaagaacaacctttcattaaaagaggagagaatcctctcctctttgttaaatctagtatactaccagtttattgcctgttttgttccccactttgcgacagcacctctaataagtgggtaagcaattgctccccagccatacgtagcaccagcaagtcctattatcgttagaattcctaaaccattatttacagcattaactatttccgttgctgttccaatagttaaaaaaaatttcgtggctacttcaaatatcaacgtctacaccccctttcatgactttttgtcctttttgtttcttacctcacttctataaaagtcaataacattaaataataaccaagcaaggaaaaggaaatagataatttttgtaaagtgagagaagttgttaaagataaaccccatagtaataaatggtatgatcataaatccaaaatactgtttccaccatattttaaaaataataacaccacctaacttttatatataaaattatgtattatttctcgtaatcactataatacaactagacaaaggagtagtaaactttttttgttaaattttacacaaaaatagaatatttaactttactctattaagatacgtttttcctaatttgaatataaagttttgctttcaaaagatattatgagttttaaataaaaaagccataacataagtttatttaaataaacttatgttatggcaaaagttccttttattcccctaaatccacattatgataaacctgctgcacatcttcaagctcttctaatacatcgattagtttctcgaattgttctttagattcatcatctaatgtcacttcattttgaggaagcattgtgatttcagcgacagtaaattcttcgacgccggcttgtttgaatgcttcttgtacttgatggaattgatctggttcagcgtatacaatcactgtttcatcttcttccatgatgtcacgtacatcaacgtctgcttccattaaaagctcaagcgtttcttcttcactttttccttcgacaccgatgacagctgtttggtcaaacatgtaggcaacagagccgcttacgcccatgtttccaccgtttttcccgaatgccgcacgaacatctgacgctgtgcggttcacgttattggtaagggcatcaacgatcaccattgatccgtttggaccaaatccttcgtagcgcagctcatcgaaattctcttccgcaccgcctttggctttttcaatggcacggtctacaatgtgttttgggacactatatgtttttgcacgttctaggacaaaacgaagtgcttggtttgattctgggtttggctcaccttgtttggcagccacatagatttcacgcccgaattttgcgtaaatacgacttgtactggcatcctttgatgctttcttttctttaatgttgttccacttacgacccatcttattcactctctttcacttagaaaatacacagtatgagggtccccatgctgcatgaaatcattctgttttctattatacatgaattagtcaagaggatagaagttagagggctgaaatgaagagatttcttagctgatgtgtccaagctgttcaagcgtttcatgctgcttgtgagatctcgtcagctcgtcgcaccgaatgatcctgccatctaataacgtgaaaagagccatgacatcaattaaacccctgtccccgcttgcgagttccacatttacagtgtaacgaaaacacccttgctgcgtatcttcatcaaataacacatcatgaaaaacggggatctcaagctgttttgtcaatccttttaatgtggatagatgctttttaaactcatcaagtgtcgaaacctttccatcagtcacttgctgataatcaggtgaaaaataagcctccactttttctatattgaatttgattaatacctcttcatacatctctttaataaatgatatcgcttctttttttgtcatgaatcaacatcctctctttatgttaaccagttaactataatccattataattaactggttaacaaaaaacaatcaaaaaaataaccccatcataaatgaggttattttgcaggctggggataaacgagatcttcaagcaatttgacatcatgctgatgaagttgtttgatcatttcttttcggacagcgagggcagcatcgaagtatttttcgtcttcgaccattcctttcactgtgatctcaatcccgcggttcagcttgttcaggcccataatgccatggacttgaaacggttcaatggcatgttgaaattcatcttttttgagaaaatcatgatgcatctgatttaaattgtcacaggccgtttcgagtgcttgaaaggctgtatctgggttttgattcgcactaattaatacagactccgtaatccgcatgtagtgcatgttatagttttgaatttgccggatgtctccgttagagatggttaacagcttgccgctccattctctaatttgcagagagcggagaccaatctcttcaatcgttccattaaagaggttattcactgtcacataatcccctttatgaatctgacgttcatagatcagaaaaatgcctgctaaaatatcgcgaatcagtgtctgggcgccaaaaccgatgacgatcccagcaacaccagcacctgcaagaatttttccgaaatcatgaaagaagagagaaatgacatacatgacaaagcaaatcgaagcggtgtattttgtaacagatttgaccaagctctcgatcgtttttttcttcttgtcctctataaactccgttcgtttaaagaaaatttgaagcgctttgttaatcataaagacggcaagccaaagaacgagtccaacaaggagaatttcaatgtatttgttcttgactattgtcagaaaagtatcgtccatctatcggttaccccctggctgtacgagaagtaaaatcaacatcttgataatagctgtttttcacaagaacattcggaccgaggcattgtacgcttggacaatggcaattcagctcttttgctaattttgtgtccatccagcgtgaataagcagattgcaatgtatcagtagcaatgtttccaagcggcggtgtatcgccaaagtctgtcacaataatattcccatcaaaaatattcacattcaaacgtgagcggccgtcagggtcatttcgtaccgtgacatgtttctcctgacgcaatcgcttgaggaggcgctgatcttcttcatctgtgctgcaagaataaaatggcaaggtgccaaacagcatccatgtgtcttgatcacgaatatcaagcagctgatgaatcgcatcacgcatttgcggaagcgtcaatgattcaagggcgctggcaaaatcacttgggtacattgggtgaacttcgtggcgctggcatttcatttcctccacgatttgccggtggatgtgttcaatatatggaagcgtgcgtttattaagcatggtttcagcagatacggtaacacctgctttgacaagtgcccggctattttcaatcatgcggttaaataatttctcgcgctgctcaaaggttggttttctgtccatcatcgcaaaaccgaccgttgcaaactcttcgacagttccccagttatgtgagatgtgaaggacatctaagtatggaataatttcctcatatcgcgccaaatcaagtgttaagtttgaattgatctgtgtacggacgccgcgttcatgggcatactttaataaagggacgacatattcccgcacagatttgagagaaagcataggctctccgcctgtaatactgattgagcgcagaagcggaacttcatctaaacggcgaagcagtaaatcaagcggcagtgcattcgggtccttaggctgtaaggtatagccgaccgcacagtgctcacatctcatgttacacaacgtcgttgttgtaaattcgatatttgtcagcttcatctctccgtaatcctgcacatcgagataggcttcccaagggtcgtatgcaggtgtaatcggacgaagtgctgttttttggttcatggtatctatctccttttcattcgggcaaacgtagacccgccaacagttaattttaagccccatcaccgttatacgcaagtggggcatcattgatttacaaggggaaaaaagataagctagaaacaaatgctaaagggagtgtatctatgggcaaggcagcagacagcaaagagcagcaggttgattatttaaagaaccgattagatatgtttatgaatgtgattgattcattagatcctgaatcaacagatgttgaggatatagacagactgatccagatgattgacgacctagaagcgaaatatgaacggtttaaaaatgattggaaggaagaatagctcgcgcagtgcgggcttttttctttaatttggcaggtgaatcagtgtatgagtctcggtcttattctgcacaatagaagaaaaaccgggaagtgacgtaaatgaaaaaatacatgctcatctgtttatgtgcgctttttgtatccatgcctctctcagaagcggaagccgtgtctaataagcccgtccactggggatttgcgaaaagcaaagaacacaagccagcagatgcgggtaaagaattgaacgtccttttaaaaaagtatgatgccttttatttaggaaacacgaaaaagaaagagatttattttaccttcgacaatggctatgaaaatgggtacacgccgaagatcttagatgtgctgaaaaaacatcaagtaccaggcaccttttttgtgacagggcactttgtaaaagatcagcctgagctcgtcaaacgtatggcagaggaaggtcatatcattggcaaccactcctatcaccatccagatttaacaacaaagagtacgaaagaaatcaaagaagagctggaccgtgtcaatgaagccgtgtacaaaatcactggaaaacaagacaacctctatcttcgtccgccgcgcggtgtattcagtgaaagagtgctgaaggaaacaaaagagctcggctaccaaaccgttttctggtcagtagcgtttgtggactggcatattcatcatcaaaaaggaaaacagtatgcctacgatcaaatgatgaagcaggcgcacccaggtgccatttacttacttcataccgtctcaagagacaatgcagaggcattggatgatgccatcacggccctgaaaaaacaaggttattcctttaaaagcctagacgatctcatgcttgaaaaagtatggcatctccctcatctatagaaaaaagcttgcagaagacctgcgagctttttctttatccttctcttattttacgttgaaacaaaatcggatgatggcgcgtgaaagagtcaatcaagccctcaccgaaaatcgtgatactttgctcccaaggatgtcctagcaagccccaatgcatctcctttgataaaaagaaatcataatccccgttaggaagcacaggcactgtccattctccaaatacatctttttcaaatgagccgtatggtgtgatccagtagcattcgtgctgccaatcgagtgccagcatatattcgtctgttctcatatgctcctgaaaagcaagtaacgctttctcttcaaggtcttcctccgcatgtagaagggaagggtcctcaaaataaacagagatatcatatgtaatataaggagatggtacgtggaatgagggaaaacgagagatgcttggattaaatttgaaatctcgatagagcgtctcccataccagctttagttcttgatgagtcaatggaatccagttttccaccttaaccgcccccaagctattctctcaacaaattatttgaaaatgcggaaccaccctttatgcttaaaccacaaaagcatacccgagacgagcagacccatgaaaatcagcaccccaaaatagccatacttccagtgtaattcaggcatgttatcaaagttcattccgtacaccccaacaataaaggtcagtgggataaaaatggtcgacacaatggtcaatgtcatcatgatcgcattcattcgattggaattcagcgtctgatagctgtctcgtaaatcggccgtcatatcacggtttgactcgacgatctcggttagtttcaaaaggtgatcataaatatcattgaaatatgcttgccggttcgtatcgcttctcatcgtatttgtgttgacaatacgatataaaaggtccctcatcgggataatcgttcttcgcagcttgagcaaatcggatcgaattccgaatacttcgttcatcagcgttccatatgttttatgaccttcttcatcctcaatttcattcagcctgtcctcaatttgataaatgattgggaaataatcatcggtaagctgatcaatcagcatataagcaatatgctcaggtccgctatttcgggttttgtcagattctttgaactttcgaatgacacgatcaatgtatggtgcttccttcaaatgaaaggtcacgatataattgtcaccgacaaacagatcgatttcctcagatcgaagcgtcttttgattcagggcatgaagcacgaaaaataaatacccttcataaaaatcaagcttcggccgctgtaaataatggaagcaatcctcaatcgcaagcggatggaactgaaagtattccttcaaaagcgctgcttccttttccgttggcgcatggaaatcaatccagtaccaggcgatatcggggcttgaaagctgctgtaatgttgcatgttcaatcaagtcgccgttttttgtcactgcaatttttttcagcatgtgcacccctccagacttgcattatatcatgaagcagcaccggtgaacttatacgtgttctgcataaaaaagccgatctcattactgagatcggtccaatgtgcgtgtatgattgatggataaaaccgagaattaaggacgacggaagttgacgaaaccaccgttacggtcgaaccagcctctaaatgcccagttgatgtagccgccgtcacctttgtttgtgaaagatccattttcaaatacccaaactccgtaagtaatgcttccgtatttcacagtagcaaacgttttgactccgttgaaacgagtctcataaccttggcttaagttaaataccatgacattgtattttgagcccgcagcatagaaagcagactccattagtcctttgacaaagccttcacggtttgtgttagcatttgcagcattgattaatgcattagctataccaagtacgtcaaagttaatattaacgtttcctgcggttgtagatgctttactttcaacagctttgtttaaaacagtttgctgaacagtagttgaaactggagtagttttttgttcagcagcgtcagctaatactggtagtgtcgaagaaacagcagtggcaagggcaacagaaagaatggtttttttcattggtcggatctcctttgtttttaaattttgggtctttcttttcgtaaaaagtgaaactaggtgaagccggttatcaatgaggtaaaatatggtcctgcaagataaaacaaatgattgcctaatcagctaattcctttgttcacctccttgatatgtcataattatacaaatgttttcggaatagaagatatcacccagaggttctatttctaatttaaggtaaataatcctaaaatattgaaggatgctgtcgaattttagctgaattcgactaaaaatgtttcttcatccaaaaggaaaatgaccgtaaataaggaagatataactgataaattcttgtactctttatgtttaaaagtattcaatatggagaatcattcatgcaaagtgaaacaatcgcatctgcgtgtttgcagaaaggaagaggaaaacatgtgggaaaaagagctggtggtggagccgccgtatcatttcgatcaagtgctcagacgcttatcaagtgatccattaaaagcagtcgatttgaataaacgagaaatcaaagtaccaattaggttagaacaaaaaccatacgttgtcgtcgttcaagccaccggaacaaaagaagcgcccacgtttcgggtgcaaggaaaaggtcctgaggaacctctcatatgtgaggtgaagcggatatttggcatgaagcatcaattacacgctgtgcatgagcatttttctcaaacgaatttagcgtccatatttgagcgtcatgtcgggacaccgctcatgctggattttcatttatatcattgtttgatgaaatgcatcattcatcagcagctcaatctggcgtttgcttatgagctcacgaaacggtttgttcatacgtacggtgagcaaatagaaggcgtttggtttgatcctttaccggaaaccatcgcctcacttgaaacagaggatttgagaaagctccaatttagtcagcggaaagcggaatatgtcattgatgtatcgaagcgaattgtgagcggctctctttgtttagaagaattacacgatttaactgatctggaggtggaagaacgtctgcttccgattagaggaattggcccttggacagttcaaaatgtgctcatgaatgggcttggaagaccaaatctctttccgatggcagatatcggtattcaaaacgccatcaagcggcattttgacctgcctgaaaagccgacaaaagaagaaatggcagcattaagcaaggagtggaccccgtatttaagctacgcttctttatatttatggagaagcattgagacagataaataaatgaaagggattttctctctttgtccaagtcatgatatactaatgagatggaataaaatgaagacaacctatcaagggttcagatagaacggagagaatgaagtgaaggaaaaacagcaaggtgcccttttacaaaagggacagcagttcccgcttaccattaaacgccttggcattaatggggaaggggtcggttattttaaaaagcaagtggtctttgtcccgggtgcgcttccaggcgaagaagtggttgtggaagcaacgaatgtccaagcaaaatatgcagaaggtacggtcaggaaagtccgaaagcgctccgagcatcgagtgaaaccgccatgcccagtatacgagcagtgcggaggctgtcagcttcagcatttggcatacgagcagcagctaaaggaaaaacgagatattgtcattcaatcaatagaacgacatacgaagctatcagttgaaaagctagatattcgaccaacgatcggtatggaagatccgtggcactaccgaaacaaaagccagttccaagtagggcgttctcacagcggtgacatcattgctgggctttatggactgaactctcataagcttgtaccgatcaaggaatgtatcgtgcagcatccaaatacgaacaaaacaacgggcgttgtccgcaaaatcttagagaaattcggtgtatcggtctacaatgaacggacaagaaaaggcgacgtacgctcaattgtcgtgcgtgtcggctttgaaacaggggaagtacaagtcgtccttgtcacatcgaaacctgaatttccaaagaaaaaagaaatcgccgaagccattcaaaaacgtctgccagaagtgacgtccattatgcacaatgtcaacggtgaaaaaacgtcggtcatctttggccataagacatctcacctagctggcaacatggtcattcaagaatttttaggagacgtctcctttgaactgagtgcacgtgctttcttccaattgaatccgaagcaaacgctaaagctttacgacgaagcgaaaaaagcggccaaactgactggcaaagaaaaggttgtcgatgcatattgcggcgttggaaccattggtatgtggctctcagatggcgccaaagaagtaaggggaatggatgtcatcaaagaatcgattgatgatgctaagaaaaatgccaaaaaacacggcatgaaaaacgcgacctatgtgacaggaacagctgaacattggctgccaaaatgggtcaaagaaggcttccgtcctgacgtcatcgtcgtggacccgccaagaacaggctgcgagcgcaccttcttagacaccgtcaaacaagtcaaaccaaaacgtcttgtctacgtctcttgcaacccatcgacattagcaaaagacctcgaatacatgtcaaaagactacaaaatcgaatacatgcagccagtggatatgtttccgcaaacggcgcatgtggagacagttgtatcgctcgtgaaaaaatagactttaatcaaggctcgaaaatcaatattagattttcgagcttttttgttttgggggcatttctttaatcagacttttttctaaatgaatataaacacttgtaatatttaaaatagtactatatagttctaattatgaaaaaagtaaaattaatgaatcaaaaacgtgtgcttgaagttgctgcaactttatttttagaaaaaggatttgcttatacaagcatggatgaattagtacgtgtaagcaaagtgtcaaagtctaacgtgtattatcacttttctaataaggaggatttattagaaggagtcgttgattattggattgaaatgtatcaatctgcaattgatgacgtactatctcagaaccaatttttagttgaagaacgtatccaactgtttttaaagcaattatcacaaggagttcaatcgagagaatataaggggagctgtccatttattactctttatattcaaagtcctacacaggccacacaaataaaagaaaaaataggtctgttttttacaggattacaaaagaaagtttctctattactgaaacaaggggtagagaatggagaatttagaaagacgattcatattgatgaggttgcatcactgtttattaccaatcttgaaggcgcgttatttatttcagaaacattgaaggatgcaactgtcattacgaaaacagcagatcatatttttaacttgcttcgataaagaagcttttttttcacattaaattagtactgattagtactaaaagggagatttttatatgagaacagtattattaattggtggaacgggctttattggaaagcaattagtcgaagaattagccaaagaggatgtgaacattcttcttttagtgaggtcgaaaagtaaagcaacacgcatttttcaagaaagaggcattttaaaagaagcagtgatgcactttgttgaaggtgatttgacgaaaatagatttagggctaagtgctgatgataaggagagggtattgagaacggatgtgatgattcacgcaggaggccccatggatattcaagcgacaagtaaaaaggcagcttccgtctttttaaatggcgccaaacatattagtgacttagctaaaagtattcatcaattgaagggcttgcagcaatttattcatgttgtcggttatatgagtccctttgatgatcaaaatagcaagattgaaattgatgtgtttaaagaaggaaacagttatttgaaaataaaaagtccttatgagagaacaaaatttttagcagatctttatattcgtcaacaggcattagcagtaggttatccgctttctgtcattaatccgccaactgtagtcggcagtagtaaaacggggagtacagagcagatagcaggattaggtttgcttgtgaagagtatgcgaagagggctcatgccggtgattcctggaggtaaggactataggttgccacttatttcaaacgatgagtttgcgaggtttattgtgcaggttttcagattggaacagtcggctattcaaacatatacacttgttgaagacaaacagaacgatcagaactttgctgaattattaagtatgatgtcagaaagtatgaatatgagggcaccaaaaatctctgtcccaatgccactgatgaaagctataatgaatagtggcgtaagtaaaataacaaacattccttctgatggactgaactttatgacaaaacgaacattttcaaatgttgcagcgaaaaaaataatgggagaagattggtttaagaagacgagtgtcatgaaatttttccctgctgtagtagctgatctggattatcgaatgatgaatcaaaatggtaaggatcatcatttatttaaacgaacattatgtgataacacgattctttatcaattacaaggagagggtaaaccttttattttattacatggtttattgagtgatggagaggatttattccctctagcacaagagctacatgaaaaaacgggtcaacctgtatggatcttggatcttccaggtttgggacgatctccttttaaaagagagaaacatcttctagatatctatttgaatgtcgtgaaaaaggtattggagaaagcgacgaatggtgcacatctaatcggccattcattcggtgcgtatattcttctggaagcattggtacaagagtacatcgataagaagtattcaatcactttacttcagccacctgttgataagaaaaaaactgcatcgcgaaatgttcctcaatttatgaacaaatggacattgaaatgggcaacgactaatatgatagggcgttatgtattaagtaatggtttgtttgaaaatacggagagcatccctggacattatattgaaaaagtcagaaatagttttacatctcctagaatattaaatacgacggttcagcttaacagcttactacagaaattcgatcaagatgatttcaatgaggtcacaaaggatcatcttcatatgatttggggggtctatgacaaaggctattctgccccatcgcatcttggtaaagttgattttgttccatatggtcatcatttcccacttagccatccgagtcaaacggcagcattggtcataaagcagatgagggtatgggataaataaaaggtttaagggagaccagcgtggctaaaaaatttcaatagtagaatacttgatgaattcgcgagaaacaaagtgaaccatataaatgaaatagaggagatgagaatgagccaattcgataatctaacaaaatacataccgctgcttcaggaagatcctattggagaatgggtcatcgatcaagaaaatgatggcacagctgaacatccgattcagatgccctttgtgaattattccgaaacggttcgtcacttgatcgaagatgtttatacctttgcaaaacaacatcaagagctggagcttacccgctacagagagatcctcaaagaaaatgggattgaaggtggaccgaacgatatcgagaatgtggacacttcaaatttaaatgcgcagtgtgtgcttgctctcatgatgggggttgtgagagccgaacggtttagcgagggtgccatattcaaattctttataagcggagctattgtaaagtgcctggaaagattggattgtttggagtgatcaaatgaaaagtaaaacagatgcagccaacacttttccacctatgaaaatagaagaaattgataacattttattaaatgctcttgatgcgtataaaattcattttacaagatccctattgtcctgataaaagtgatattcacagtgtgtatgtcatctataaaaagtctatactcaatttacttgaaggtaggattcgttctattcatagtcatgaattcatgaatgctaagaaaaaggatcgagcgatttctaaagaagatattgaatatgcactagagatggctacagttgtggttcttgcaagtgaaaatagtggagtactgacaaattatttttatagcggagtcggcgaaaggttagatcgtatttttaatatatgcttaggttattcttcagatttacagaaaacagagaacaaagtaagattgcaacgatttatgaatgatataaagattgttgaagagatgggattgttagaaaaattttaggatcatgagcaaaacctagatgttagagaaatctaggttttttcgcgcttttgaaaaatttattcaacttcatgttgaccttccccttaactgaaaggtttatactttgatcagatcaacaaaacggaggagatgcaggatgttcaagatcggcgatttttctatgttaagtaaagtgcctgttaaaaccttaagatattatgaccaaattgatttattaaagcccaagcagatcgatcaagattcgggataccgttattactcagctgaacagctgcttgaggtcaatcgaatttttctctataaggaattaggctttacgttaaagcaaatggggcagcttcttcgggaagatatttcggtagagcagattcagggcatgtttctgctgaaagaaagtgagattcagcaattgatcgagagagaacaacagaaattagcgcgtattaaggagcggatgcacctcattaaacgagaggggtgtgttgaaaaagaacaggaggtcattatcaaatctgttgaaagcaaaagcatcatgtcttttcaatccaacggaactgttgacgaaattccttcattctttcaaacgtttcatcatttattacttaaaattcaacaagaattgatctcgggaccacaagtggtgctgtggagggaatcaatggaaaaagaaagtgagttcgaatttgaggtggggtattccgtcaaatcgttaaggggcactcttcctcaaggaatcaagatacgtacgttacctgcagaagaaacaatggcgacactgttatttcattcacattctccatccgcacaaactgcttgtattgacctggcgacatggattgaaaataacggataccgcgtgaaagaagaccagccgggccgagagatttattaccctttgtctgaaaatgaagaaggcagactcattgaaattcaaattcctattatagatgaaatcaaatcgtaaacattgcccaaaggagaaacgtcacgatgaaaaacaaaaccgttgtctatttacttgctttagcagcctttttaattggaacgattgaatatatcattacaggcattatccagatggtcgcagatgatttacatgtcacgacgtctgctgctggattattggtcacgtctttagcgctctcagcagccatcggcgcaccgattgtcattgcactgacgatcaatatggaccgcagaaaaatattatcatggatgctgatcatttttattttaagtaatttcatcacaagtgtcagccattcgtttgaaatggtgatgatgacaaggattttacaaggaatcagtggggggacggctattgtagtggcaatggctgttgcgactcgtcttgtagaacgtgaaaaaagaggaacagccattggcatcattttaatgggattaagcagctccttggttttaggtgttccaatcgggacatttctaagcagtatgattggatggaaagcattattcgcaaccattggattgatcacgcttattccgctgattgttgtgtataggcgaattccgtctatgaaagaacaagaaccggtgacacttggtatgcaattatcgattttaaaagataagcgaatattacttgcggtggcagtgacgctattctatgtaggtggatattccacgttatttacctatttaacgcccttcctgcaagcatcagcaaaccttagtatcacagaaatcagtggcattttattactagctggaatatgcagctttttgggctccagccttggagggattgcagcagataaaaagggcccaatattcacgattttctctggaatcattctgcaaatcatcatgctcatgctgctagcatttgtcacagggaatctcgtggtcatggtggctgtcatcatgatatggatgatcgctacatggagcacatcaccagctcagcagctatatcttgtaacacttgtaccaaaatctcctgatatcgcattaagtgtcaatacatcatttattcaattcggatttgccttaggctctggtgtaggagggattgtgttaagcgaaacatctatattaaacctaagctggatcagtgctggaaccgtttttctcgctttactcatgaccattctaatggtggcgtttgaccgtttttctcagcataagagtttgaaggtgatcgaacaaggaagctaacttaaattcaattttgtatagaaggaactacttatttcgggtagttcctttttgatttgaagaatgaaccagtgaagttgtttatttgctacaataggagtcaatatccaaagaatgaaggcatcaacaaatttcttttaaaaacgatgaatgtctaacaaaagaactgctagacgaggagagaaaatagaatgcaaataagtgaggatatcatcaatcgaaaaggcgctcgaaaggggactgatatccctcgtgacgtctggacccttttgaatcagggagagatcgaaagtgtgaatttaactgaatggctggctgtcaatcatatgacgctaatacagcatgttttgccgtccgttggtttagaccattatatagacgatatttcatctgagatcactaaacaaaaagctgaatcaggaatgaaagcaattcgtctcatcggtcaattgttagatgaagtgctacacgaagagaatgaggaaaaacaagcggaagtactacaggcatttgctcaccacgtatctgatagcgttcgctgttgggctgcttatatgaacaaacaacacttatcaactctggaagagaaacttgcgtacattcagccatttgcagctgatcatcattttggtgtacgagaaattgcgtggatgtcagtgagagaaagcctcagtcatcagcttgatcaaagtatagaatatttaacagaatgggcaaaaagcggggatgaaaatattcgccggttctctgtagagtcgatccgtcctagaggggtatggacaaagcatattgagttattaaaacaagagccagagagggcactgcctattctaaatttactcaaatccgatccatcaacatatgttcaagattctgtaggaaactggctcaatgacgctagtaaaacacagccaaattgggtcatgaacctttgcgaacagtggtctaaggaatctgatacaaaagcgactagcagaattatcaagaaagcgaagagaacgatttgtgaaggggaatctgtgaataagagcttgaactgaaatccttttttgaggggatttctatctataaatcattcagaaagaaaagtctcaaagcgagctcagtaaacagattgccccatttcgtgggatatagtctcttcaattctgcattctatatatatcttatcctctcattgtcatacttttgaatgaaattgactcaatagaattgacgcaagagccatgaataggtgaagatgaaataaactgtaagataaagggagacaaatgatgatacatatcgtatttggggcagcacctgccggtagtttaaaacaagcattacgtgaaatgaagcaagatcaagtaaataatattatcgcctttgatgacatttattcgattggaccccttttgcatttgcatgaacatgaaggacaggagaagcgtatagagtggctgcgtaacgtgatatcaaatgaatttggctattttgatgacatggtcaacgatcagcatagaatgcttcaacaaataaaagatataaaagatggtacgcgtatcctcatctggacaggcagtaatgcacatgagcaaattggtttacgatatgccatctatttattaaaagagaaaaacattgaattgactctactcaatacaacgactgcatttgatcagctgttcaatacaaatacaagacgaatggatattcgccatgccggggaaattacaactgaaaaattgaaggttttgtacagatgtaaagagcacattcacgcagtatcaaaagaagaaagagagaaattacaaaacgaatggctttcatttgctaaagaaaatcatacgctgcggatatggcaaaaaggacaaacgatcagtgtaccagaagatgaatttgatgcttatttagtgaaaatggctaagcggcttcatcagtccgagccagaagaggagtacatcgtaactccacgcttaataggagaagtcattggtcatttagatcagtatatcggtgatgattttatcgagtatcggataaagagattaattgatcaaggcatttttgacatgataggacgacgaacttccatgcgttattactcaattaaactgacagaattcggtcagcacttcaaaaaatgggtgtgctgccgtgaatttgaggatcatccttttgtgaaaattgaaggagattacggtggtgaaccttttcattgtgggtattgtcaatgtcatctagaaagagatgatataccaatgagcgatacacttttctcaaagatttggaattggaacatacagtatggccgctggtttgacgaagagacagatgatttggtgccaaatggcgcagacatggaaaagaaattcaatcaagaaggagagcgtatcactgaagaagtgaaacgagccttatcccctgcgtttcaaattgaatacagcccaagtaaatacacgcaacacatcatttaaagaatgaatttcaattgctctgcacaaaataaagctttacatgttctatcatcatcatgtaagatatggagaaattaaaagcgaagaaaaggacatgagccatttttactggttaccagagagggaagtcacgctgaaatcttcctaacgcaggaaatggtcttaccacctttgagctgtattggggaaaattgaagtatccaataccgtctacgccacgttacggcaccagagccataaagcgaatacgcgttatgggaatttgggtggaaccacggatcacacattcgtccctttatgagggatgggtgtgtttttttgttcactcaactatcatcaggctttgaaaaggacatgagcagcttttatcggttactagagagggaagtcaggctgaaatcttcctaacgcagaaaagttgtcttaccacctttgagctgtattggggaaaattgaagtatccaataccgactatgccacgttacggcaccagagccataaagcgaaaatgcgttatgggaatttgggtggaaccatggattacacattcgtccctttatgagggatgggtgtgtttttttatatcaaaaaatgaaaggtgtgtcagtcatgaaagaaaacatggtgaagattcaatttccagatggaaagataaaggagttttctgcaggtacgactgtcgcaggtgttgcctcccatattagcccgagtttaaggaaaaaagcagtggcaggaaagatcaatgatcaattggtcgatttaagtcaccagctggacagcgatgctgggctgtctattgtcacactcgattcaaaagaagggcttgaagtgctgcgccatacatctgcacacgtattagcccaagcggtgaaaaggttatatgacaatgtcacacttggaatcggacctgtcatcgaaaatggattttactatgatatgaagctaaatcaaacattaagcgtagaggatttggcagagattgaaaaagagatggaaaagatcataaacgagaatcatctcatccaaagaaaggaggtctcttacaaagaagctgaatcgttgtttgcacatgatccatataagctggagattttaaaacgactcccatctgaagaagccatcacagtgtatcagcagggtgaatttatcgacttatgccgcgggcctcatttaccttctactgggttcgtaaagtcatttaaactaacacgtgttgcaggtgcttattggcggggtgacagtcatcaagatgtattgcagcgagtgtatggtgtagcgtttcaacttccaagacatctagctgagtatcttcatttcatggaagaagcaaacaagcgtgatcaccggaaattagggaaacaattatctctgttcatgttttcggaagaagcgccaggtatgccgttttatttaccaaaaggtcagcttgtcaaaaatgaattaatggctttttctagagaagtgcgaggcaaagcgcaatatgaagaagtgagcacaccgtttatgatgaaccaagagctttgggaaaagtcgggacattgggatcattatcatgaaaatatgtatttctcagaagtagaccatacaagctttgctttaaagcctatgaattgtccaggacatatgctcatgtttaaaaacagcttattttcatacagagaccttccgatcaggatggctgagtttggtcaggtgcatcgtcatgaatttagcggagcattaaatggattgttcagggtcagaacattttgccaagatgatgcccatatttttttgagagaagatcaaattgaagctgaaatcaaacggattttccaattagttgatcatgtgtatcggacatttgggtttgagtactctgtggaactatccactcgtcctgaaaaagcgttaggcgatgatgccatttgggatatctctgaatcagcgctaaagaatgtgcttgatcggctaaaagtcgattatcagctaaatgaaggagatggggcattttatggcccgaaaatcgattttcatataaaagatgccttgcagcggagccatcagtgcgccacaattcagttagattttcaaatgcctgagaaatttgatttaacatatatcaatgaaaagaatgaaaaggtacggccagttgtcattcatagtgccattttcggttctctggatcgtttccttggcattctcatcgagcattttgcaggcgccttcccgttatggctggcaccagtacaagtacaaatcatccctgtctcaacggttcaccttgatcactgccttgaggtgcagcagcaattaagaaagatcggaataagagtgacaatcgatgaacgggatgaaaaactcggctataaaatgagagaagcacaaatgcaaaaaatcccttatatcgctgtcattggcgatacagaaatggaagaaaaaacactgaacatcagacagcatggagaaaagacatctagacagctgtctattgatgactttcaacacatggcggctcaacaaataaaagacagaacagatgcacaaatatgatgtgctgatttcatgaagaaggataagacgttcattgaatgatgggcgtcttttcatttgcgaaaaaagccgaattgacagtagaaagggaaaatattgaaacattttttcggtaaaatcgtaataaagatagagcgttcaacagaaacatttaaaacggagaggagtattacatggaacaagctgcactgaaaaagatgaggacgaaacaaatagctgtctctaatttaatagccgttatcataatcgtcgcttttttaatgttgattcaaattgttgaaattcgatttacacatttctttctttgtttaggaattttaatgctccttcaaagcatttatggttttattaaaaaaggatcaacaaagtctttcattccaattttcgagcagatagctatttatgaaaaagaaaaattggggaaagagtgggagaaagaacagaagatggataatgtttggaaactgatattgagtgggcttatgttctttcagtcttttagcttccaagatgtatcgaatccattctttgatatccaacctttatttctacttttcttattgattatggctctagctcttatcaatataagcatgctttttcgctttagaaaaatcgaccgatcgactgatggagaattaacaggctatacaaaagagtcaaacataatgggaattgctttaggattcttgttagtaatcatcatcttcatctttatcgttatttttgttcttccataaaacttaaccaatttgaggtgaaaccattgaatgcaaacatacaacgattgattgatcagacaaaggcgaaatttggcttagatctttatcatctaaaaagatacagctttcatcgttacgtcaacatgtttaatgaaacgatttatacattcaatatggaatggttcccctctcatgaaacggaacctgaggacgacgatttaaacccagacggcacagccgttattgaagtgaatttgaatacgggacaggtggaaacagttatttttgtcatggacaaaacctatgcgcagcatggtgtcacatttaagagaccatatccagctcatgtcattcaatggatcgaacaagaaacagggttgatctatggtgagcattttcacatgcatcagaaggagaaagggggactttttttcgaagaagcaatagatggtgtgaaagtgacgccttcaggcagaattgaggtgaaatgggatgaacatggacagctcatgtactttacacaccacggaccatttttagccaaaacattactgagagctgaggaatatgtgctttctattgataagctggagaacttagccgagcagcaagtgcagcagtttcaatggccttccttcgagcacaatcgaattcgaacaatttatgcattagaagaaatctatgtcaagaacgatggaacaggaactataccgtttgaaattgggcgtgaagaaacactttgtatacacatgaatgagatcattgaatggaatgaaccgttaaacaaagcctttgaaaaaaaggaaatgaatatccatgaggacatttcagctgaacaagctttctcattggagccttcaccggataccatcccgatatcaaaagaagagcaaactgagtgtataaaagcagtccgaacctttttggcgcaaaaatattcaaaggatacaggaaagtgggttctgaaaacactccatcgtgatcatggatacatccatgcgatattaaaaacgaacgggcaagaaggcagtggatttatggacaagatcaaggtcttcattgacgccagctcgtttgaagccgttaattacatagataaaaaagaaatgtttcaagtgtgcgggatactgagtccctctcaagcggcaagtgaaattactgtatctcagaaagaagcctttgaaaaattgagagaacgtcttgaactgacacctatctacgtctatgacgaagcgcaaaaacaatatgttctatgcggaaagctcgattgccatgatggtgttgatgcagagagcggcgaagtgttttctttgaaagacctctcataatgtctgaaagaacagtgaggagctgttcttttttgtctcattgcaccaattttttgaagaaatttggaattttgtagcaggaagttgtcgtttcatcacgaaagaaacagataagaatatgatcataggtccatcggttggaatatagtagacgtcatacatagtaaacactcctgacagtaaagttgagctacaatgctttttgaagaaaaatgaaatcgtgtctctagtagtatacgacatttggtggactgacatcataggatgacttgaacacgtttgtttttaggtaagcttgaagccatgatagaagaaagtgaggatatctaccttgagtacattggaagtgtttcgtcagtttttggttgaccattatcctgcgttacaagatgaactttggctgaaagatgttgatacccttcgaatctctcctattcttcatccttttctgaaaagcaagctgccagaggggatcgaaaaattcacttgtgtactattcacgcagcagacagatcaaaccgctgcaccgctcaaagtataccttctattagatgaatatgagcaatcactttacgccattgatttgatgaatgaacaaatcgtgcttcattaatacagaagcaaaaagctgcttgagaagctctcaagcagctttttttgatgaacattagtcgatcatatcaaccaatcttcggttcaagttgtccaattctttctttgttggaaaagagctgatcagcagtgtatatcgtccaaattgaatagggagctcggtatcggtcacgatcatatcaatcccaagttgatccatcgttacatcatttaatgtattttctggacttgtaaaagtgtgaatgagaggaggcacgcttaatttaattaaatctgctataaacaaactatgataatagcctaatgttgaaataacaaatatgttcaacacgtttcttcgctccatttcaaattgaacaagccctctccaggtagacgtaatgatacggatcaattcccgttcatttttcacaaaagaagcgagtatatcgtctgtttttaactcttggatgatatgagtaatcctcgaatagaagtaaggaagctgctctttcacctctgataaataactcgatttctttttgaaaaggaatccatctctcacggtaatttccttagaatacacataatattggagaagaatcagtgtcatcaccttgcgattagccacctcttgatgataaatcaactccaattgattgataaatgaatgaatggcttcaaagaggtgtggtgtatgcgattgaaagaacgtcaacttttcttcgacagattcaattgatttaaagtggccaatagctggttcgatcaatagtaaaaagacaaattcgtgatgatccagtgtaataccaaaaatgtcctttgtcatttggcaaatatgctcttcccagtttttgatttgattatagatacctttggctgtagaggtctgtttttcttcattcatcgagtacgtataattgcgtcgtatggtaaaatttttcctcactcggtgaatggaaacaccgagccacaggcagtatttatctatagccacatctggtacattgacttcgagcacctgaaatagctcttgtaataaatcaactgcgtcttgcttttgaatatcatcgaatggccaaagccggctgccatacacttcaaacaaaaactcaacaaagaattgacgaatctccttctcattcccatggaactgcatactatctgggcgtaactcgatgtcataggatgtaaggatcgaattgattttatgaatggtgttatacaatgtggatctactaatattaagcgtgtccatccattcatagaaagacctgttttgttcgaaaaaaatgccgtcaatcaatcgaatttcaatcgtatcttttaaaatttctttgatatagtagtctactcgtatcgtctgtgtataacaaatggatatgccttgtcttggctttatgtggattaacggctctccattctctgttttgaacgatttcatttgttctaaatcgctttgaatggcacgaaccgaaccgatatgttcattcgatatttcttgaaggctccaccacttatttttggatacaagcagttttaaaatttttatccatctctttgatttattatcaatgagctccatcaaacaactaactccttcccttggcttgcctctatattatgaagttcacttaaagaacatttgattctcaaaataggcatgaaatgattgtaatgtttaggctaaatcgttttgtcttcacttttgatgataaaagagaaaaaaattagacgaaaacaaatgttatgcgctgattctccatatttttcttttaaaaggtgataagtaagccatgaatcctataaaaatggatcattttagatattttgtttatttttttgctgttgaaacggtaaatgtaagaataaaacggagaagctttttgattaccatatgaaagggagtagaaaggaatgcgatctatatgatgctgaactgtctcaccatacataccatatgatacatgcttgtttcatatgaatgaaccatatgtgaatatatgattatataagcatgtaaacatcatttattgttcattccagtataaatagaaaattcacatttattttttcatgatccctctcactattccccatttctatagacccctatccagttactatatccactactcatgattacctttcaagctcatgattgatcatctcattttattcatagggtcttaaggtgcaatttttagaaaatatttgattagaaacggagtggtttatcagacaagatacaaatggttttttatcgttgttgaaaattaattttagaaaagggtggatgtattgaaaagaatattgtcattggctctcatcgcggtgttagtcatacagtctagtatattaggaatcttgcctctggcaggggcacaagccaaagaaagccaagaaaacatttatggggatattgagtttgctgatagcgaaggaaacaagttatcaaacatggaagatcagcaagtaagaaaggccactgtccattggtctataaaaggaattgatctaaaaaagcaatatccgtatgttctctctcttccttcagccattcaggtagagaaggagcagaatgaaccaattattgtcaatgaagtatctgttggagagtataccgtttcaaaacaaaatgaagtgacggtcatatttaaagaagatgttgagcttgatccaaatttagaaggagcaatagacatcgatgtcactagtatatctgagcaaaaagagaaaacaaagcaaaacgagcgtaaagaaagccttccaaaagatgacacaacctcaactgagaaagacaaagcagctaagaatcaagaagccgctcaaacgaaacaaagcgatgaggatgaattactaaaaaacaaagtgagcatatctaagcgtgtagggctgcaaagtgtttcaaaacaaatgctgatacaagaaaatctcctcactgatgcgaaattgatatttgaagatcaggaaggaaattcagttgataggcctgatatcaactcgctgatttccattaactataagtgggccatcccgaatgggcatagctataatggcggtgatgaattccatttcaaggttccagaggaattagtgatttacgaaaaaatcgatcgtctcgagatgaaatttaatcaagcaaccattggttatttttctgtagatgaaagtggaaatgcctccatcgaattcactgactttatcaaacaatattcaaatatccatggaacacttcaagtgtggacgcaattagataaaaaaactgtcattactgaagaaaaagaagtggtcattactccaattgaaggcaaagatacgatatcgatcccgattcaatacattccaaatggcccaaatgtctctaaaaagggaaaacccaatcgatcttacaatgctgaaaccattcaatggacagtcgattttaatatggacttagacgatgtgaaacaagcgagactgttagatccgattcaagaaggtcaagcgttaaaaaaagattcaatcaagctttaccgtgttgatacaaagctaaatggtgaaacctcgcttggtcagctgcttgacgaaaaccactacacaatcggccaaacagcagatggtcaagatttcacgattgaatttaaagatgacgtgcatctagcttaccgtttaatgtatgaaacggacatgacgaatcaagatcagtctgcgtttcgtaataaagcgtcccttgtctctgctgataaagtgattagttcagcagaaggaacagtgaatgtgacaagaggcagtcctttaagtaaaaaagccgcccactacgacccagtcacacaaataattacgtgggaaattcgttataactataacgaaaaaaagattgctgaaaaggatgctttgttagaagacttctttaatggcacacaggcgctgatttctgattcatttcaagtcaaggaagtcacaattgatcaggatggcaaagaatcaggaacaaaagcgtttggaaattatgtggttcaacctcaaaaaaaggatgaacaaaacgggtttaccttgcaattcaatcaagatattcaatctgcttatctcatcacatatcaaacaaaagcaaccgagcggatttttgaagctgaagagattatcaatactgtaacagctggcaaagagagcaaacaagggaagcaaagaattgaccaacaaatcctaacgaaaaatcatggaacaccgaattacaaaaacaagaccattccatggcgtatcatcttcaacaaagatcaacaaaccatgaacaacctgatattaaaagatacgtttacaaacgaaggattgacgctgcaaaaagatagtttaaaagtgacgacaggaaatacagtgcttgaagaaggcacagattatcaaatagttgaacatgcaaatggatttgatattcaatttacgaaagaaataaagacagaacatgtagtcacatatacaacgtcttttgattatgaaaaaagagcagataaagatcaaaagaacttgcgtaatcatgtaaagcttgaatgggtaaatgaagatggcaaggaattgacgaaggaaaatcagtctgtcttcacgcctgacacatatacgcagtcaaatgggttcaagaacggaacatatgatgcaaagaaaaaagagatcacctggaatatcggtgtgaactataacttgaaacatttagaagaggcgaaaatcgaggatttcattcaaggaaatcagcgtttgcttaaagattcaatcaccatctactcgcttgatttacatggcggggaaaatggagcagaagaaaaagaggtattagcgaaagaacattatgacatcaaattccttgaaaatgaaaagggagaatcaggcttcgaagtcattttcaaaaatgccattgattccccatacaaaatcacgtatcaaacaagtgttgaaggaatggatttagtacagaaaacctacgaaaataaagcggccctttatgatggaaagacgaaagaatcagatgtgaacgctgtagtgtccattccaaatggagggaaatacacgagcaaatcaggaaatcagcaagggaaagttattgattggaaactgaatatcaattttggtcaatcaacagtccaagatgcgacgattatagaccatccgagcagtaaccaagccataatagaaaactcatttcatctctattcgacgacaatagatgaaaaggggcaagtgaccaaaaaggaagagctggaaaaagggaaggattatgagctagaccttgaattcgatccagactcttttcaaatcaaatttaaagaagacatcaccagaccatatattttagaatatcaatctctcattttagataaggtgggaagtacacttcaaaacgaagtaacgtttagaggtgaaaatgtaaaagaaataaaaaaggaatccgaagcctcaattgtggtaaaacgcaccgctggcatgggagatggcacgggagcgattggcgctttaaccattaaaaaggtagatgcgagtagtggaaaagtgctaaaaggagcaagcttttctctgacagatgctgcgagcggtatcgtcattggaacaaaggcaacagatgaagaaggagctcttcgatttgatcgtctcttgtatggtgactatatagtgacagaggtgaaagcacctgatggttatatgaagaccaaagaaccgatccatgtaacgattgatcagccttacgaatcaggagatcaagcgaaaacaggaaatagcatgacggtgcagaaccaagaaatccgccagcatgtcaagttaacaaaaaaagacaaagagacgggtgcagcattagaaaatgcagaatttgaactaagaaatgaatctggagataccgtccaaacccatttgaaaacggatgaaaaaggagaaattcttttcaaacatcttgagccaggttcctattatttcgttgagacaaacgcaccgaaaggctatcaattaaatcagcaaaaatggccgttcacaattaaagagaatcaaacagaaacaacgactgtaaccgcagtaaatgacatgataaaaggctctgcagaattgagcaaaataggcgaaggcggagagagactagaaggtgcacaattcaagctcttagatcaagatgggcatgagctaaatggttcgcttgtcacaggagaaaatggcaaggtcacgataaatgaactaagaccgggtacgtatcagctcattgaaacaaaagcacctgatggttatgtattagatgaaacgccaatcaaatttgaagtaccactcgatccaaaggaaccagtcatcatttcgaaaaagaacctctatgaaacaagtgcattagaagtgatgaaagaaggggaagatggcaagaagcttcaaggtgttcgatttgaaatcatggatcaaaatgatgaagttgtgcgtaaagatttgacaacagatgaagatgggaagcttttggtcgacaacctcaaaccgggcaaatatcagctcgtggagacagagagtattgatggttaccaaaagaaaaataaaccttatccttttaccatcgaagtcgcacaaaaaactcaggcagagatcaaagtaatcaatgatcttaaaactggagctgtccagctcacgaagctcggtgaaaagaatgatgtgcttaaaggagcagaattcaagcttttagatgcaaatggaaaagagattgaaacgggtctcgtctcagatcagaacgggcagatcacaatcagcgatcttaaacctggaacctatcagtttgttgaaacgaaggctccattcggtcatgagcttgacgaaacacctgtcacttttgctattccatttaacccacagaagctggtcagtgtcacaaaagaaaatagccgcacaacaggcggagtgctgctgcacaaaaaaggcgaagatgggaaatctttagaaggggttgtctttgatctatctgatgctaaaggaaagatagtggcaggaggagaagggattacaaccaatcaggatggaaaaatcaccttcacaggtctaaaacctggaacctatcaatttgttgaaagaaagagtcttgaaggctatgaattgaatgcgaaaccacttgtctttcaagttgaattaggtcaaaaagagttgattcaagtggaggcaatcaatcagctcaagaaaggttctgtagaactaacaaaaataggggaagaaaaagaaagattgaaaggcgcagaatttacacttttcaatgacgatggtaaagaattgatgtcaggtttaacaaccaacgagaaaggcatcatcactgtaaacgatttgaaaccaggcgcttaccaattggttgaaacgaaggctccttttggacataaactagatgcagaaccagtagactttaagattgatttcaacccaaatcaactggtgaaagtaacgaaagaaaatattcggacgacaagtgctgtgaagcttcagaaaaaaggggaggatggacagttgctcgctggggtgacctttgacctgattgatgagcatgatcagcgtattcagaaaaacttaaagacagacaaaaacggtcaactgacagtcgatcaactgaaaccaggaacctatcgatttgtcgaaacagcaagcattgccggctatgaattggatcagacacctgtctcatttacgattcgtttaggtcaagacaaaccagcaaaagtagaaatgatcaacaaactgacgccgggagcagtggaactgaccaaagtggatgatgagggacatacgctggaaaatgcagagtttgttcttctaggtaaagaagggaaaacgttgaagaaatcacttgtaacggatcaaaaaggaaagctccacatcaacgatctaaaaccgggagaatatcaattcgttgaaacgaaagcacctcacggctatcaattggatgatcagccgatcctgtttacaattgagaaaaatcagcagaagccacttcaattaacagcgaagaatcacttgatgttaggaagtctgcgtatcataaaagtagatcagcagacagatagaaccttaaaaggtgcagcctttgacattcgtacaaaagccgggaaaaccataaaatctgtgacaacaggaaaagacggagaagccattgtcaaagggcttaaacctggtgagtatatactcacagagacgagagctccaaatggttatgtagctttaaagaagccgctcatctttacaattcaaatgggcgaagtggagatcaagacaatgattgtgaaaaatgcaccagtagagaatgaagaggaccacacgaatcctccagcctcacctaaaggtgatcaacatccgcctcatgactcaaacggtgagctgccaaagactggagaagaatggctgcgttatttgatgtatgcagggattttactagtagcttctggaactgttcttcttgttgtcagaagaagaaccattcagtaaaaggaaggaacgagtttattgatgaaaaaaagaaccttattaggcagctttttggtgttcacagggctgatgctcatctccattccttttatatatgagtggcgaacttctcaagagacagcggcaatggaacaggcattaaagatgattgaagaaaatgacagtgatgccctttcttctattccacatttaactgtgtcagaggaagacctacgagatgtgatggagctagagatcccgtcaattgatttaaacgaaaaagtgcttccagttacatcaaaagaaaatttaggtattgcactgactcaaatcaaatctcatcaaatgccaggtgaagggaatttcacgattgcagggcatagagggtatagaggtgatcgtcttttcaggcagctgccagaggtgccgaaaggagaaaaagtcgtcttacatcatcaagcggaaacatatgaatataaaattgtcagctcagctacgattgaaccgacggatgttgatgtactaaaggatcgcgggaaaaatgaactgacattgatcacttgtacacttgatggccagaaacgctttgtcttaaaaggaatacgaatcaatgcttcaaagggtgagcaaccgtcggatgtataacaccaacataatagatgatgggtacgatggaaaagcagcgctcacgaccgacatgttacaccaattattatcagagcattatccaacattaaaaaacgaactttgggatgttgatgtagatacaattcggacttcgcctattcttcatcctatattaaaaagaaagcttccaattggtatcgaaaaattcacctgtgttttgttcacgcagcaaacagcagcttttggagagcctttgattgtgtactttttattagatgaaaaaggcgaatcgatttacgcaatggatctcttgctcgagcagcatgatccacattaaacgagaaataaaaaaggaaggggctttgactcccttccttttttgtcattcaattatgcaaacaacttcagcccgaccacaccaatcacgatcagcagcaagctgagtatacgaatcatgtttttcggctctttaaatagaatcatattaaacaagacagagcccgccgttccaagtccaatccagaccgtataggcaacggatacttgaacggaagagaacgaggcgtataaaaacaaaaaggataaggcaaatccgccaacaaataaaatgcctgtcgtgatttgctttttcttactaaacatattgaggccaatggttccgccaatttcacaggcagaggctaacagtacaaaaaaccagcccatttataccgcttctcctttctgctcatgtgcatccccatcagacactttcagtccaataattccgagaattaaaatgcccataaataagagcttttctaatgaaaatgaaccgccaaacagcgcataatccatcaaagacgtaccaatcgttccaactccggcaaacacggcgtacacggtccctgtcggcagcttctcgcaggctttcattaaaaagtaaaaatcaactgggatcaggcatataatgatcgcccactcccacacagcatcagctttatttaaaccaaacacccaaagtaattcgaataaacaagtgagtgcgacatacatccagctttttttcatcctatttcctcctaaaactgacgattcgtcattttgaaaccaaaaaagagcgtacagcaagtgctgtactaagttaaggtgtctctatgccaagtgcgtaaagaagaaattgcttcacctctcgcttttgaatcagaacctcttctgtatctgtttctgtaaataagtacatttgctcagcagacgattcaagtaaaccgataatgaatttggctgcatatggacagttcaaattcgcacggactcttttgtcctgctttgctttttctaaaaaagcagcgacccatttgtaaatcggctcataaatatcttcccattcctttaaatgctccgtggcagctaaacctgagtaggtcagagcaaggacatcacggtattgtcttgtaaaagagaagatgaattcaacaagcgcatctgcttgatcgaggacatccgcatgctgagttaattccttttcaatagcggggaccatctgtgagatcagatattctgcgatagcaggcatgacagacagctttgaaggaaaatataaataatacgtcccttgcgccactcctgctgctttcacaatatccgatatggtcgtcttttcaattcctttttctttaaacgcgtcaatggcagcaagcataatcttttctcgtttcgacacatcttcaccgaccttaaatgactgaatgtcagtcagtttagctgaaaaatgacgatttgtcaatatggtattctcgtcattgaatatgagaataagtgatgaatagatgcgtgcaggcctgaataagctgtaaatatggtcaagcatcatgtgagaaaggggcagctctccgtatgacatccagtgctatagtttccattgcttattttctcctgctcgtcccgctctatctacatatgagatacagacaggcgaaaaagcaaaaacgatttatctatttacgtacagaattagttcttgcctgtctatttatttatacgaatgttttattatatttgacggtctttccaaatcgtttttctgcaccaagggatcaggtgagtgtcaacctcatgcctttgcagtccatttatcaaaatcttcacgcctaccatcacggctatcccaatcttgtttttttaaatctggcagggaacattttgttatttgtgccacttggtttttttctatatcaagcatttcgtaccatgcgctggcaaaaggcgattcttgctggctttttcttgtcaacaatgattgaagtgcttcaatggatgttctcgcaatctggtatcattacaagaagcagcgatattgatgatatcctcttaaatacacttggcacagcgctaggttgtatcttgtatcggatgtatcgacgaaggaaggagaaaatcaagtgaagcgagtttgtatcattccatgtggggctaagaaaatttgggacgtccatccagaggcagggagccagccggcgaatcttgtttatttaagtccgctgcatcagtgcacgaaaagctatgcccaaacgttcttttcagactggctgatcttatcagcgaagcatggattcttaaaggcagatgagatcattcatgaaaattatgatgtggcttttggtacaccgcatgctgatcaaatgacacgagaagcactaaggcaacaatttcatgaaaaacatctcactgcatatgatgaactagtgattctaggtggaaagaaatatcgaaaggtgatcgatcctttgttacttcctcatcaaacagcgatttatccgctggctccatataaaggaattggctacatgcttcaggcgttaaagcaagccgttgagacaaaagtagaacttccgccgcatatttaaaccattcacatctactggtaggcagggttttgatcatcaaaaagagaatgaatgaagtagcgatgctgattgtttcatatcttttcagcagccactaggatgtccgcatcgcttagaagaggtggctatttgaaaaagggggcgtatgaacatgacaaccatctatttagctggtgattcaaccgtttcatcttacccagaccgtcctgttcaaggaggatggggagagtttttacatcgctatacagcgcaaggcgtgagcgtcgaaaaccgtgcaatcggtggaagaagctcaaaaacattcattgaagaaggacggcttgatgacatattggctgacattcagccaggggattggctgttcacacaaatggggcacaatgatgcttcaacggagaagcccgagcggcatacagatcctttcacgacgtataaaagctatttgtctcaatatattcatggagcaagagcgaaaggagcaacaccgcttttattaacgccagtcggccgctttcatgaaaaagacggtgaatatatcaatgatttccctgattactgtgccgctatgaaagaactagccgatgaagaagaggtcctgctcgttgatttgaatacggcaagccttcagttttatcaaatttccggcatagagaaaacgacctcttactttatgctgtcaacaggcatagaggatcgcacgcactttacaaaagaaggagcagatgcgatcgcacgacttgtttcgcttgaattaaaagaccttggattaacgattgtgtgatggatgacaggacgagtaagcgctcgtcctgttcttttttgcagaaagctattgattcctttcaccagagtagactacaatagatacatatgataatgagaatcaatatcactgacaaatagatcaatcgatgaaaaactggagggactcaaatgacagagcagcttgaattgtttgacgtcaccattattggcggcggtccagcaggaatgtacaccgccttttatagtgggatgcgagacttaaagaccaaggtacttgaatacaacgaaagccttggtggaaaaatccttctgtatcctgaaaaagtcatttgggatgtagggggtttgccgccaacaagaggagaacagctgattcagcagctggaaacgcaggcgaaaacatttgaaccagagattgcactgaatcagaaaatcacgtcttttgaacgagatgaacatcatcacatcttgctgacggctgaaaatggtgatcgccatttgacgaagaccctcattttagcgatgggccacggcattcctgtccagcggaaacttgaaatcgagcatgcagaccgctatgaagtgacaaacctttattacacagtgcaggagcttaagacatttgcaggaaagcgggttgttatctctggaggcggcgactcagcggttgactgggcaaatgcgcttgttccgattgctgaaagtgtgaccgtcgtgcatcgccgtgacatgtttggcggacatgagaaaaacgtcgccaacatgaaggcatcttgcacacgaattttaaccccgcatgaactgacagaacttcatggtcaaggcgataaaattgatgctgtcaccatccaaaacatagagacaggtgaaatcgaacgaatggaaacagacgctgtcatcgtcaatcacggcatgaaaggtgatttaagtgtattatcagaatggggactcaagcaaggtgaatggggactgatcgaggtcaatgaaaaaatggaaaccaatttaccgggtgtctatgcggtaggtgatttatgtacacataaaagcaaggtccgcttaatagctgggacatttgttgacggagtcaatgcgctcaatagcgcaaagctttatatcgaaccagaagccgaaaaagtggcgtacgtgtcctcacataatgaacgctttaaagagaaaaacaaagaattgcaaacggctggagctcgttaaatcattcaaatcacatcataaaagtgctgcccgcatgtggcagcactttttatgtgggactatgaactgcggggcgcaaataacatcacactgaccccggctaaatagatcaaagcacctatccagtcgtaagaaaaagggaactttttggcaaatgagacgtagtacatatggaggtgaaacagatgaaatcatacatagaaaaagaactatttctcttatcagtcagacacgcatgtattgcatgttattttttagtatttccgtttgctgcacaagtcctttataccccatcacctttattgatcgccctcatcgctctttttatgactcataacttagtagaatgtatcatttggttttacaaatcgagaaagatcaggaagcaccagtctggtgatctatcgaaacgaggacatgtctttactcagctcatgcaaaggctggaacagctgatcatgatcggttttgttgttttctttatcactgaatggatgcagggagcggctgatctccaaactctttcactagctgtttttctattgatgatttttttcctacagcacattcagttttattacgtccagctattctttaaatccaaaagctggttctcctatgttccttcattgcaaaaggcacgtccttcttatatagcgagggagcgaaaggctttgaagagatcctaaatgtgcaacctatccaaaaacatcagaaaattatgataaaatgtggaaaagaagcatggagaaagggagtgcgagcgagtgaaagccgttggactattggagtacttaccgattgagcatgagcaaagcctgatggatcaggaagtagaaaagcctaaagcaatgggcagggatatactggtgaaggtagaggcagtctcagtgaatccagttgatacaaaggtgaggtcaccgaaggatcagaaggaagaaaaactgaaaattcttggctacgatgcaagcggcacggttgttgaagtcggtgaagcgtgtacattatttcagcctggtgaccacgtgtactatgcgggagatatcacgcgtcaaggctcaaatagtgagtatcagcttgtggatgaacggattgtggcgaaaaagcctgccaatctctcctttgcagaagcagccgtgatgcctcttacgacgattacggcatatgaagcgttatttgaccggatgcatatgaagcgaaatgcagaaggggcaacactgctcatcatcggtggtgcaggcggggtaggttctatcgccattcaactagccaaattagcgaatgccactgtgatcgccaccgcatcaagacctgaaacaaaagagtggtgtctgtcattaggtgccgatcatatcattgatcatcatgagccgcttctcgcgcagcttcaggaaaaaggaataggcgaagtggattttattttatgcttaaatgacacagatggacatttcaaaggcatggcagaagccataaaaccccaaggcacgatctgtaccattgtcgagaatcaacacaatctagacattcaattactcaaaaataaaagtgccgcatttgtatgggagttcatgttcacacgccctatgtacaaaacagcggacatgatcaaacagcatgagcttttaacagaggtagctgagttatttgaacagggaacattaacgcataccttaacaaaggttctcagtccgatcaatgccgctcatttgaagcaggcgcatcaaacgcttgagcaaggaaaaatgattggcaaatttgtgctagaaggattttaagagaggggagagcgtatgacgtcattacaatatccgattggcttatatgaaccggttgaagaaaaaacgaaagaacagcttgaggcatggattgatcagttggctgcgattccacaagagtatgaagcggtgacctatcagttgacagatgctcagctagatacaccctatcggcctggaggatggaccgtccgtcagctcattcatcacgtagcagacagtcatctgaatgcatacttacgattcaagcttgcactcacagaagaaacaccgcacatacgtccatatgatcagacgggattcgccgagcttccagacaccaaagcgcccatcagcctatcactgcccttaatcagcagtctgcatcgcaggtgggttacattacttcgagggatgtcagaggaagacttcactgcgtcctattatcacccagccgatcaacaaacggtgtccttatatgatgcaacaggaatgtacgtctggcattcaaagcatcaccttgcccatatcacggaattaatgaaaaaaaatcactggaattaaaggagtcatcacatgtctggtagaagaattgtcggcgccatgtttatttgcatggcggcattgttttatctagcgaaatacgtacttttcgagattcactattctggaacgagtttcgctgaggatgtaaataaattccaacttcttgaagaggtgctgcctggcggtacgtggatcagcatcctttttctcatcatcggtttagcctatcttttatgggatgacaggggagttattcaaaaaacgtttatcctctcagataaacaagtagaagaagaaataaaaaagacggacctcaagtgaccgtcttttttccttttcatgtttagccgcgttcaggacgcagtgctttttctaaaatagctagaccttcgttgactttttctttttcctcgtcattgagccgttgcagggaatttttgattttttcgtgtcctttttgataaatgcttctgaaaatatttttcgcttcctccgttagttcgacgacaatgattctccggtcacgctcagagtgctttcgttcaacaaatttagactgttctaaccgatcaagcagacctgtcatattggacaaagaagcgcccattttttcggcgatttcggataccttgagagagccatggttattgagcaacatgagtaccttcatttgaggcatactcatatcgagcttcatccattctgaaacatctccaagacctgcagctgtgagtactttcatataaagcacccatgtctttttttcctctggagatagaatctcttcttttaatacagtggtgtcatgaatattatattccacgcttgttcacttcctttaagcggctcttttctctatactactgatttttacttctaattgaaaggttcgtcaagcttttgaatgttaaactgcatgaatcaagtggtatttgttgtataataatgttcagtctaaataaatgaagcaacctagaaagttggggaaaacatgtggaacaaaaaaacgggtatgacgatcttaaaaatgctttttccgatcgtgatcatccttgtcttaatttttgtcgccaagcaggagctgagcggcctttccattaaaaagacgttttatattattgacagcttgaatcgaatggacttgtttattcttgtctttcttggacttgtcgcagtgttatcgatgtccttatatgattttattttacgaagaagccttaatatgcccatcagcggctggaaaacgattcgcatttcttggattgcgaactcctttaacagtgtccttgggttcggcggtctatcaggagcagggcttagaacgcttctatacaaggagtacataaccgatacgaaaaaactgctgaaaggcattgcccttttgacttcctcggtccttttgggcttatctattttcagtgatctgatcttggtgagggtgcttcctgttgaaagtattatcagccaagagccgtggctatgggcctttgttatcatctttgcctgtattgtaccgatatatatcatcatggcatcaattcgaaaaagctcgattgagagcggtgaaaatggactgaagcatccaatttacgcttatatcggtgcatcgtttttagaatggctggcagctggtcttgtcatgtacatggctgtcgtctctatggggatgaatgtcgatgtccggattgtattaggcgtatttgcgattgcgtcaatcggtggtttaatcagtatggttccgggcggatttggttcgtttgatctcatctttttactcagcatgcagtacattgggtttgataaagagatggtgctgacggcgctcgttttgtaccgcttcgtgtactcgattttcccgtttatccttgggctttgtctagctgcttacgatttaacgggaacgacgcttagacgtcttgaaggcaatccgagaatggcacctgccatagaaacaacgaacgtcttaattgtgttgcaccgtgctttattaatccgtttattgtacggatcattatcaattttaaccttcggaagcggcttgctcatcatggcgtctgttgtgcttcctgtcgatcgattaggcgtgattaccagcattccacgctttctgttatcaggatttaatggtctttctttaatgttcggaatcattctgatgatattgtccattgaagtgtataaacgaacaaaaagatcgtacgtgctgacgatgatcgccctagcaggcggctttgtgtttactttgttaaaaggatttaacctgagtctcatctttattctgccagtcatcatggctgtatttttctctcttcgaaatcaatttgtgaagcagcaggccccttattcgttgtatcagtttgtggcggccgccgctggatatttactcgtgctgtttaactataatgtcatcggcaactttatttggacaaaaattgggcatttcttgagtaaggattacctggtgcataatgaacggcatatcacgatgacgagcatgattgctctcatcggtgtaccacttttctttttcattagtaaattgatttttaataaaaaagcatttcctattggagaaatagcagatgaggaaaaattaaaaacgtttttagaggaaaagggcggaaatgccctcagtcatcttggctttttaggcgataaaaaattatttttctcaagtgatggagaggcgatgcttcaatttggacgaattggccgctgcgtcattgtgctcggagatccctctggacgtaaagcgtcctatccacttgtgcttgaggagtttttacagcagaccgaaaaagcaggctatcgtgtcgctttttatcaagtagaacgggaagggatggcgctttatcatgacttaggctttcatttctttaagcttggagaagaagccatggtcgatttagaaacgttctctctctccggtaagaaaaaatcaaatttacgggctgtggccaataagtttgaacgagaaggctatacgtttgaaatgctggaaccgcctttttcagatgagttcatttcaaccttaaaacagatttctgacagctggctcggaaagaaaaaagaaaaaggattttcgctcggctattttcaagaagattatcttcaaaaagcaccggttgcgattctgaaggatgaacaaggggagatcatttcttttgtgtcactaatgccgatgtatcaagaaggcgagatttccatcgacttaatgcgtcatatgcatgatgcaccgaacgggatgatggatgcgctgtttatccacctttttcaatgggcgaaagaaaaaggctacaaatcctttaacatgggaatggcgcctttatcaaatgtagggacgtttcatcagtccttcctcacggagcgtttggcgagtgtcattttcaacaacgtcagatttatgtacagcttcagcggattaaggtcgtttaaacagaaatataaacccgagtggcgcggaaaatatttagcgtataaaaagaatacatcattacctgtcacaatggtgcttgtcaccaagctgattgggatggacccaaatcgcaaccggcgtccatagatccaaaacctttacctttcactaggtgaaggtttttttagacaaaagaatagcaaaagtggtaaagttgaagggtaagggggatgtaaatatgacattaaatgaatggtttacaaagggattaactgaacgtacatatgtacacaacatggagaaaaaccgagaaaatctgctcacggtgtacaatcagtacgcaattcatcaaaaagaaaaagagctgcttcaaaagctgcaaaagaaaaagctcagagcgcttgttatcacagcggattggtgcggggatgcgatggtcaatgtaccaattttcatgcgtatcgcgagtgaagcactcattgatgcgcgctatttcattcgggacgagcatctagacctgatggatcagtatttaacgaacgggaccgcaagatcgattccgattatcgtgatcattgatcaggacgggaatgaagtaggaaaatgggggccacgctcaacagaagcacagcgctttgttgatgagaaaaaaccagacaaggatgcacctgattttgaagaagcttttcaagtatttgcgaaagaagccgcacatcactatacgacagatcgttacttatggaaagatattgagaaagaaatagtagaagttttggaaaaaatataaaccaaaagactacttcgccgcaacgggaagtagtctttttttatcttgtttttgcgtctcacctacaaaacaccgcataaagatgtagaaaaaccgcagaattctacaaaaaaccgcagaaaaccgcaaagcatcacgattttcccaaccatttttagttgaaaaacctcatatgtgccatgaaaacctcaattttgcccttatctaaaggctcatataacgcacgttggtttgctttttcccaatacaagaggcccagcaactatagtaatctagttgtaatctcctttgaacgaactaaaaaacaaatgacggaaaagggctggcgatcaatctatgaaaaaaatcatttatctcgatcaagaaaaaaagaagctcgctgaatcgaaaaaaagagaacagcgttccatcaaatcacttaggctgcttgtgttttatgacgggcaaagtccttcatgtgcaaaagcgattgacttgttgaaagctctcgattggaagaaccgtattcattttgaatcctttaggcattcgcaactgctcaagctgaacaaaataagtgaagagaaggcagaaaaacgaatcgtgtctatttccttagccaaaaaccaaaaaaattcggggatctatacgtggctgcgaattgcctgcaatatccctgcattatggggaacggtcccattcatcgtgctcagcatttggttaggctttggacagcatgcgtatgattattttgcgagaaaacggtacattcattctgtcaaacaagtcactcgtcctggtacagatcaacagaagaccatttaatgaattggaaaagcatgaccttcgatcggcagaaggtcatgcttttttgtaatagggaacatatgatgctaagtgatcaagcagcgttctcgtataggacatatatgcacgttcgtcaagctcagaagccgcataggaaagcaaggttctaagagcaaacaagtactcactgtgcagctcattttgtttaaagtaaggaagggctgcttcgatcaaataggttttcaaatcaagagggttttcctcaatcatcaatttatagattttgatcatatataaacaatttggctgaatacgaggctgttttaagagctcgtgtatgtagggaagtgcctttttgcggtcgtattcagcatataatgtcgcaatttcatacaatgtttcacagtaacggtcttctatctgttcttgattaaagtaattgagtgaatctagtaaataaggcacagctgaagagaaatcgccttcacgttttaagagcaccccgtaataaaaataagccgtcattttaatataggcatcaggataaagggacgtgtgcataatcacttcttttaaatatttcttcgccgtttgaaaggcttttagttccagtgagatcacgccatgaatgagtgtacagtgaataatccgcttgaaattgttcttttgtctatataaatccatcgcttgatgtgtcgcttcaagcgcatcaccaagatgtcccatatttccgagtgcttttgcatagtgataatataggtcactttgttcaacagacgcgtaagaaaagcagctctcaagtttttttaagccttcttcaagctgaccattttttattagatgaatgccatctaaatattcgaaaatttctttttctgtttcaataaaggttttttcaaactttttaagcacgcggtgtgtttttaaggcaagcggctgtttgtccgttaataaataaaattgaaataaggacagatgatactgaatgcctaaatccagcgaaaagaactgttcctcgtgctgaatgatcatttctgcattttgttctgcctgatcgagtgcatagaaatacatattcatttgaaactcgtccaagagtgacagcaggtgacgcgccttttgtgacagcgtttcttgactgatgcccagccgttcaagcagtaaattgatggtatcttgattggcctcctttgagccattttcgattttacttaaatgagagacagaacaaattccttctgccaattcagattgggtcatattttgtttataacggtagagcttgatgatttgcccgatattgattttcattccatccagaagcctcccttccaatcatgggttgaaagccttttgacaaaataaccgaatcagacaaaatgggaatacctgaaaccatttcatcatcctggtttttttatcaaaatttgtttaaaacgtaatatgattgtaacattacttgaaaaagtcaaacaactttttagcagacaggaagggaaacaccatttgcaaattaccctaaatgatgtttataatgtgaatgagaatcaatttcaattaagattgattgaaaggatgacagatatgccagaaatcaaacaacaaacagaagcgttaacgattcgagacgctgtcagatatagacgatccattcgaaaattcaaagagacgccggtgaccattgagcagcttcagccgttattagaggatgcagtctatgcaccgaaccataaaatcacggagccatggcgctttctatatgcggtgacggatgaggccaaagcaacttttgttgatcgcttcattgcgttctttcagcgcaacaacccagatgcaaaggaagaaaagatcaatcaatatagagattacttttctaaggtcccagcgcttttacttgtcgtgctaaaagaagacgagaaccctgtggtgagaaatgatgattttgccgccgtgagtgcgcttattcaaaacttccagctgcttgcgtgggatcaagggatcggtatggtctggaagagcggccgcattttatatgacaaaggctttcaacaagacatgggcttaaaggaaaacgagcgttttgctgcgatccttcacattggttatccagaagaggtgcctgaggtaaaatcacgtcagaaagcatcaagtcttttaactgaaattcaataaaagaaaagcagaccgctactaaagggtctgcttttttacttattgttttttggcgcgctggtcggctgctttcatacgtgccattgcttttacgtcattcggatctgcaagttctttggaaaattcaacatattcgccatccgtctcttgtgctgcaagctcatgattggatttttggtgttggtcttttttcaaagcctttccctcctttacaagatcactttagttatgtgcttgttggagtggaatatccatcttatttgtttcttttttctgctgctctttccgcttttttgaattcctgctgatacaggacttcctgggttttcttcagctttgaagttggctggtgttcttttttcttcatcaaaattgccccctcatctcatttctaataggatgggtgtttttgacaaaatttattcctctgaatgcaaaatggtttcttttaattcaggatgcaaaaagtcataagaagaaagcaatgcctttttcggcagcgcacgctggccttctaaaacaagtaatgacatttcgccaagtgccgtttgaatgacaaaggatgggaccttcagccagtgggggcggtgaagggcagacgcaatcgtttgtccgagctgcttcatttgcacaggattcggtgatgtgacattgagtggacctgagatgtcgtcatggtgtatcgcataagcaataaggtgtgccacatcttcgacatgaacccatgaaacccattgcgaaccagagccgatcgtcccgccggcaaacagcttatatggcagagtcatcagtggcagtgtaccattttctcctaacacgacaccaaagcgtgtgtagacggtacgaatgccaagtgcttcaatcttttgcccctcagcttcccaacgctttgaggtatgacttaagaaatcagtatccgcaggaggtgattcctccgtaaaatctcctgtttgagacgtgccataaattccgacagcactagcttgaatgagcacagatggtttcgattcctgcgcttctataatgcgtctcacttcttgtgtggattgaatacggctagagaggatgccttcttttgccttgtctgtccagcgggtgaaaatggattttccagcaaggttaatccagacatcaatggcaggcagttcatgctcaggcgcagcaccttctgtcagccactgcacatagtgtaaatgattttgttcggattcctttggatttcttgttaaaatatatagatgatgtccttcagcagcgagcacttttgtgacgtgctggccgataaaaccggttcctccggtgatggcgatattcaattgacatctctcctctcatatacatacctatacctttcacgattttgaatcagaagaaacatcctgactgtattaaaaaaggagtgatcacaggatgccctatattacaaaaatctccgctcagaaaaacaatacagagcgggtgaacatctttcttgatgaaaagtacgcctttagcgttgatctagatgtgctcgtccagcacgacttaaaaaaagggaaagagctggacgaagcagatatcattgaaattcaattcggtgatgctgtgaaaaaaggatttcagcaggccgtcgattatttatcctaccgaatgagatcggtgaaagaagtgaccgattatttgacgaaaaaagaaattccagcgcctgctattagtgaaattatacacaaattaaagcattacaagtatgtaaatgatcttgaatttgcggaagcctatgtaagcacccaccgtaaaacgaacagcaaagggccgtccgtcctgaaaaaagagttaaagcttaaagggatagacgatgacaccattgaacaagcgctatcgcaatatcctgatgacttacagctggaggaagccgtcaatcaggttctcaagcttgtgagaaaagaaaagaatcgttctgcaaaagagatcgagcagcgcatcaagcttcagcttcagcgaaagggattttcgtttgcgatcattgataaagcccttcaagaagcctatgatggacaagaagaggaaaaggaagaagaagccctcctctatatgctggagaaggcaaaacgcaaggtaggatatgacggatcatttgaaaagaagatgaaagtgaagcagtttttattcagaaaaggctttgatctcgatacaattgatcacgttttagacaaaggggaatgacagatggaaaaacgttatagtgagatgacggaatacgaattgaagcaggaaattgcctctctttctgaaaaagcacgaaaggctgagcagcttggcattgtcaatgaatatgccgtcttagaacggaaaatcgatatggccaaagcctacttattagatcccgccctcattcaaaccaaaacgacttatcaaatcaaagatacagacgagcaattttacgtggaatatttaaatggcgtatttgcgtggggatacagagtatcggctccaaataaggaagatgccctgccgatttcaatgcttacgaaaaaggactgatccagctgtaggcaaaccctcgcattcggtgtcaggtctgtaagccggtgctcgtccttcctagggctgcaaaggttttctatcacgctgaaaagaagacaaaggactgatcctagagatcagtccttttctttacttcgaacgctgtttacggacgttgttctgaagtacgatgtcgtgctgcgtttgctgcgtttctccgttgacctgagaggcagaatgctttgcattcgcccatggttgagggtaagcggttgtccttaattgaacaaagtcttccatatacgatttcccatttgaactcatatctcaagcactccctttggaaaaattagcgtttccctgatgccctcatacgttcctgtggacgtgtattcgtctcaccattcggccttttagacgcataagcatctgtggcgcctggctcgccttcaaatttgtgattcacttgatttggaaagccttttgctttattacgcatctcgattccctccaaacaatacaaatcatttgcgtcttttgaagacgtaagggtagtatatgaaaaaagaggtttttttaaaaaggcactttctgctagatgaaggaggaaccgacatggaacaatactttgagcgactaacagaacaactcatggaaaaaaacaatatgctgacatatgaagaagcacgtacatgggtagagctgctttggagtgattttgaaacgacctatgcaaaggctggccgcaagtataaaggacaggaaacaacagaacggattgtccaagaatggattgagagctacggtgcacagctgcatttatttcaaaataaacaatcaaaggcaaacgagcatctgcaagggcagaacaaagggctgcttcattaaaagaagtgcccgctcatctttttcaataaataggaaaatatataaataagcaaacaattttatgatacaatacccagtctgtgatcgaaattacaggctttttacaatggttaaacttaaaattacattaaattcatcttactgaaaatcactggaaataaaactttgatataatggaacgattaaagagacatgtaatttatggataataaaaaagggtttcgttttctgacaaaaaaggaataatgaacataacagactatgtgaaaaaagtgaagagaaggtgcgatatggaacgagaattgctctctgttataattccttcttacaatgaaggtgaaaacatcagacgaatctttgaggcactcgaggaagagtttcgcgattttcattataactttgaaatcatctttgtgaatgatggaagcaaggacaacacacttcaatacatgagagagctctctcgcaaaagtgcaaaggtcaaatacatttccttctcgcgtaactttgggaaggaagccgctattctggcaggacttgaatatgcgaagggagtagctgcgatcatcatggacgccgacctgcagcacccaacgtatttgattcaggattttgtcagagggtatgaagaaggctatcatcaagtcattgccaaacggaaccgtaaaggagacagcaagcttcgctcttacttagcatccatgtactataaagtgatgaacaaggtagtagaagtggacttgcgtgatggcgtcggggatttccgtttaatttcacgccaagcaatcgatgcattgcttcagctgaaagagggaaatcgtttttcaaaagggcttttttgctggattgggtttgaagaaaaggtcatctattatgaaaatgtagaaagacagcatggtgatacaaaatggtcactgaagaagttatttaactatggcatagatggcgtcatttcttttaacaaccgcccgctgcgtatttgtttttatactggcatactgatcttattcctctctttgatttacatcgtggccacctttattcaaattgtcagaacgggcgtgatggtaccgggttatttcactttaatatcggctgtgcttttcctcggaggtgtccagcttttgagtctaggtgtgattggagaatatattggccgtatctattatgaaacgaaaaagaggccgcattatttgatccaagaatcaaatgtcatgcagcaagagacaagctcaaaggaacaagaccgagtgttaacacagttatttaaataacgtggagtcaaataaccggcaagcacgaatcgcttgctgggttgttttgtttcaaagaacagtggatcttttgtggaaaggatttagatgatgaaacgtagatggataatcattggaatgtgcctcattcttgctttattaggacactcctttttcttatatgaatatacgcaaggccggtacatgacaggagatggggacggtatctcgcaaatgctcccatttaaaaagctgctttacgacgaatatgtcaaagggaatttcttttattcctatcaattcggtctaggcggcggtacatacacgcaattagggtattatttcacaacgtcgacggtctttatggtgacagtcgctgtcgtctggctgatgaatacgcttcatttcatacagtcaacggacattcatttctgggcacatgctgtgatttggctgagcgtgatcaagctgacgctcattctaatcatcgcttaccgtgtgcttctttcaatggttcaaaatagactaagtgcattgacaggtgccgcaatttacggactgtctattgtgtattttcggcatcaaacattttgggagttttttaccgacagcatgatgtggcttccgctgcttgtgcttggggttgaacggatattcaaaacgggtaagccggcttggtttattttggcgtgcagcctgatgctcatcaacaacttttactttgcttatattcattttatctttttagcgatctatcttgttttcagatatatgatcaagctgcgaagtgaggagcgcgggtggaaggtgttctggacgcttgcgatctctacgctgttatcctttgggatcagtgccgctttttttatcccgtctgtttatggctttctcaataatgtaagaccaccgtatgaacaggccattccttggttcgagctgcatgatcatctgctgtttgcaagcagagtgtatttattacctgtgatttttctgatttgtctgttcctcgttccgctttaccgaaacagatggtttttcatgttcacatccatcagtatgctgctcattgcttttcactttagcccaaagatggcgagcgtgtttaatggtttttcagcaccgcagtacagatttgaatacattcttgcctttacagttggagcggtcgttgccatcacgatcaagcatttctcacaaatcgagtggaagtggaaaaagcgtgcggtcttaggcgcctggatcgtgttccttctcgcagtcgctctttcagaacgagcaaagggaaacatggatgtcgttgtgtttacaggcataggactgcttgtgatcagcttgttcttcctatggatgcatgcggaaaaacgtcagcaccttcgtctcttttcagctgtgcttcttgccattagcctactgacagcaggcgtgtatcagcaggaatacttatctgaaagaagcaatataaagagcgtatcagatacgtatctgaatagtgaggcatatgctggacatgagcaaatgaagctcattcagcagattcaaagccactcaaaagatccgcttgcccggattgattggatgaacggcgtgcgcaacaacaccccgttatttgaaggctttcaaggcatgagtgcgtattcaagtatattgaatcagcatttgctcaatttctactggaatgacctgcaaatcgatatgggacgggaaagtgtcagtcgttatgcaacaatgggggacagggcgaatttatacagcctgacctacggaaagtattatatgagaaacaacatgatgccttactcaccaccagcttattttaagccaattttgaaaagtgagcattatgaggtatatgaaaatactcggccgctgccatttgcaagaacaacgagcaccgtttattcagaaagatccttaaagaatgcctcagcacttgataaagagcatgcgatgttgcaaggcgtcattttagacaaaaaaggaaacgctgaaatcgagcgtgcagcagatcgagtcaaagatacgaatattcatacggaacaagctgtatacgaacatggcgtgcttgatgtatacggagaaacaggcggcctgaatatcacactgccagatgatatggcccgttcaggggatgtgtatgtgagcttttatgtgaagcggaccgaccgtaacgcagggtttcagttatccgttgacgactacgtcacctcacgaaaaagcaatacatccatctacaaaacaggagtaaatgaagtgacgattcgagtccctgcggaaaagatcctctccattcgagtaccaaaagggacatatgagctcaatcaactgaagctgtatcaagagccttaccgcgtcctagagaaagcatatgaaaaagaaaaacaggatgatggcagccagcaggtaaagcttaaaaataaccgctttacgatttcatatgataacaagcgcggcgatgattacatggttctgcctgttccatatgaaaaaggctgggagctcacggtgaatggacatcaaaccgatattgaaaaagccaattacacttttattggttttccaatagaaaaaggcaaaaacgagattgtgctaacctactatccgccttatattagaattcttgcgttgatttcactcgtcagtttgattggtgcgatcctatatgcacggagaaaacacaagaaacaccacttttcatcataagtggtgtttttttatctttcttaaaattgatacaatcaacataaaagcatgagaatgggggaaaaccatttgacgttaaacaaagaatccattactgatcattatgaacacacccttgaatgggtacagtcactagcggaaataacagacgaagaatggcgcagagccattgctgatggaaagtggagcattgctgagatcatcgcacatttcgttctatgggatgaatttattttacacgatcgtctaaaggaattttggaacaatcaagcgttaccgcaggcacctgatgtgcatgaaatgaatcgacagtcagccgaaagggcgagacacgaagagagaagcgagacgattggacgatttattgctgtcagaacagaattgcttcaagaaatgaagaaaatcgaagcatctcgctggaatacatcctttttgatcggtcaatccgagctgacgttatcaagttattttcaaggactgattgatcacgacatccatcatatgaagcagatcaaagaagcgctttctccagaaagacgatagagagtcatgaagcttctttctcaaacggaaacgtcgcataatcaaacaaaaaatgaaacaaccaaagactaagggcaaaaagaatttcctcagaagtagacagccaaatgccgtcaaccaattcgtctgataaataaacagcaccccaaataaacaaaaggtgaaataaaatggcatagaaaacgatggatcgttttttagaccggcactttcgaacaaactgcatgagcacgtgctccagatgttcaaaagagatcccgagtacaacatagatgcccataaacagtagcagcgataaaattgattgataaaaagcacccgtcaaatgaaagaacagcacacaaaacaacaaaaatatgtaacagacaaccgatatcgccatcagccacttcaccccttgccataaagcgtgaacagattgctgcatggataaacaacactcctttacatgaagatacctgcaaaaaggacagcctttttgcaggaaggtggaattaatcctcttttttaggtgcagcgatgacaggatgtttttctgtatcaagcagttttaagaaatcttcaccttgatctaaatgatcaagaacaagctgtttcggtgtgaccgcaagccactgattgagtgaaatgtctgcataatgatcgcttttaaagatttctaagaaataaagcggttcgtcgcctgtattctctacataatgccccatcgcaaatggcacatagccaacgtctcccgcctgatagttgaaggttctcgcatgtccatcagaagcaaatacggtcattcgtgcctttccagaaatgaaatattgccattcatccgtatttggatgccagtgcagctcacgaatggcgcctggatcgactttcacaagagcagaggcaattgttttagatgctttaaaattggtagaatccgcaatccacacttgtccaccgcttgacgtaatcggctcttgttttaacagctcatatttaaaggaattcgggacctctccttgctctgttttcaccttgtcacattcaagggaaccaggaattcctttttggaaaatatacttttctttctctggcagcttgtcaaactgctcctttgtcataccgaagttcttgagcacgacttcctctggcgtatgggcaagccaatccgttacttggaacgtactattttctgagaatgacccatcatcaaacacaagcaagaattcagctcccggctcaagtgcttgaatagagtgcggcaagccagaagggaagtaccacaaatcaccctcagtcacatcctctgtaaaattgcgcccctctgcatcaaccgatgtaatccgagcttccccataaatcatgtacgcccattccgcttccttatgccagtgcagttcacgaatcgcaccaggctttagccgcatattaacagaggcaagacttttagagatcggcagttcacgtaccgttacctcgcgggcgtagccgcctttttctaaacgattgtgtgtatcagaaaaagaatatttcatgttggagaccgttccatgatcggtttctggcggcgtgagcatatctggattttgtctgtcccgctcgagattacgtggaattttgaccgttgctcctttttcttctcgaatcggctgcggtacaccattttgcttttcactcatgataaaatcccctttcaacatcgtattgtgtgaggtgacaaaaggcctttcatttcgccctcgttttcataaggtgaaacgaatcaagaagatgtcaatctgattcatcatttttttgaacagcgaccaatcgttggatgagcttgcttaattcatcaaactttcgttcaaagcgtgtcagcaagtaaatcgtcaaaatggcagggaagccagcctgaccgagctgcttcagccactcctccgaaaaaaagttctccatttgtctcacctcccagcggatgctcgtcttctatataggtggtctgaaagaagaaaaaggaaagcagaggaggagaaaatgaaccattagacccgtttcataaagtttactttttttaacttttgtccacttaatgcaagtagagggaacaaaggggaggatgcacatggattatcggctgttattgaaagcaaaatggaaggaaatcattgatcacccgctcattcagcagtttttaagcaacccgaaaaacgagcagctgctcaaacaagtcatggaagagccaaacgaggaaaatgccaaaaagctagattccgagttcaaacagttctatcagaaaatccgcatcatcaagtatatctccacaatgatacgcatcttttcagtcgactttgacaaacgagtgaaaaagaagcagcagcgttttccgctcatactcgatcatcctgatactcaagaagtgaaagaccctgtccaaacagatacgtatgaagccgtgctcttcaaccagcaagacttaggagagcatctgcaagatcaaacattgtacaaggcctaccagcagctgacagacaaacaaaaaatggtcttaacccaaatctatgtcgaaggccaaacgatgaaggaaatagccgaccggctaggcgaaacgagacaaaatatctcaaacatacacaaaaaagcgctcaacaaactaaaagaagaaacagggggagatgtccgtgaacgaagaaaaaatgaccaatggggaaatggaagaactcattgaaaccttcacacccatgatcaaaaagaaactacaaaacacggcatatcaagaaagagaagacctcgaacaagaactctatatcaaactcatcgaaaaaatagaccggctgatttaccaagaaggacctggcttttgggagtttattgtggaatatatgacgaagttgtaagaggaactgatggtgcgaatgtcaggtgaacataaaatccccggtgcattcgcaccttttcattcgacaaaattgagaaaaaatgtatattttataaaggggaaaacaaaattctttattgaaagttgtggattttgcctatcatttcctaaaaaatgttacaattagggcagaaatcgctgtcgcactctacatgagtgcgtggattgaaattaataccacaatcaaaattgccgtcaatcattttgtcgcactctaaatgagtgcgtggattgaaatgatattccgtgctttgattaatgcataataagggtcgcactctacatgagtgcgtggattgaaatttttattgtgttatctttagtgaattttctcattgtcgcactctacatgagtgcgtgaattgaaatctgcgcatgtcgcaaccatcctttttagtcgtggtcgcactctatatgagtgcgtggattgaaatattgacgctttactttcatataggctgtcatagtcgtcgcactctacaagagtgcatggattgaaaatttgaattggcagcatcatagaccaagtaaccccagaactggctcagtagtccatatttttaaatgaattcaaagctgttgatgaaacagtgaaataagtatgttttcaagagcaatagtttttatttaaataggattaagaaaaattcggtgcgaatgtgaggtgaacataaaatccccgggacattcgcacctttttattcgacaaaaatgagaaaaaaattatattttatgaaagggaaaaacaaaattctttattgaaatttgaggattttgactatcatttcctaaaaaatgttataatttagggaagaaatcgcagtcgcactctaaatgagtgcgtggattgaaatgacaccgaacaaacattctgttaaaatgtttttggtcgcactctacatgagtgtgtggattgaaatatgtatccagaaatcatcgactttctaatttgtgtcgcactctacatgagtgcgtggattgaaatgtgatcggcacgagacccacgtgcatatggggtggtcgcactctatatgagtgtgaggaataaaattcttgtcagtaggtagcttgaaagatttattgacattgcgcttgatataggtgtgaaaaacataaatctgtctcagccattttattaatgaattcaaagctgttgatgaaacagcgaaataagtatgattatcatcagtagtagtttttaattaaataggattaagaaagattcggtgcgaatgtgaggtgaacataaaatccctggggcattcgcaccttttcattcgacaaaattgagaaaaaatgtatattatttaagaggtgaaaacaaaattccatatagaaaattgagggttttggctatgattccctaaaaactgttataattagggcggaaatcgcagtcgcactctatatgagtgcgtggattgaaatctgaaagtgttctcactgtacggatgtcataaagtcgcactctatatgagtgcgtggattgaaatttcgaatagctttccagagataacaagtctccctgtcgcactctatatgagtgtgaggaataaaattcttgtcagaaggtagtttgaaagatatattgacaattgcgcttgatataggtgtgaaaaacataactctgtctcaccaattttattaatgaattcaaagctgttgatgaaataatgaataagtatctttagagcaattaaataggattaagaaaaattcggtgcgaatgtgaggtgaacataaaatccccgggacattcgcacctttttattcgacaaaaatgagaaaaaatgtatattatttagaggtgaaaacaaaattccatatagaaaattgagggttttggctatcattccctaaagaatgttataattaaggcagaaatcgcagtcgcactctacatgagtgcgtggattgaaataatctgtcactgaaatcatctattgaaaaatcgcgagtcgcactctacatgagtgcgtggattgaaatatatagccgttgtctttttggtcgacccagcgagtcgcactctacatgagtgtatgaattgaggtagcttggaagaaatgttgacagttgcgcttgatttaagtgtgaaaaacgttactctggctcagtagtcatctttttaaatgaattcaaacctgttgatgaaataatgtataagtacttttagagcaatagcttttaattaaataggattaagaaaaatttgttgcgaatgtgaggtgaacataaaaaccccaggacattcgcacctttttattagaaaaaatgagaaaaaatgtatattttatgaagaagaaaacaaaatcctatattgaaatttgtggattttgcctatcatttcctaaaaaatgttacaattagggcgaaaatcgcagtcgcactctatgtgagtgcgtggattgaatatgctaaaacaccgacctttcttcggatcgcatcgtcgcactctatgtgagtgcgtgaattgaaattttgctaatcctgttgcttcaacaaccgttgacagtcgcactctacatgagtgcgtgaattgaaatagaatggaatgtcattcttgcgtttaaggctcccgtcgcactctacatgagtgcgcgattttaaatgattgtgtcttaaactggtatgaccacctaaaagaccatctttttacaacatcctctttcaaatacaaaagccatatactggttatttgtatagtgaaaacatgactcattgcagtcatgtttttttcttcttctttttcctaaataaaccttaaaaaatctcaaaataagtcgaaatgaaaagtagtcatttagattcaaatattatccattcgtaatgaatgatgaaggaggaattggtttgggtgaaacggagcgaaccggtaaagtggagcagctgatcttagagaattatcaaagattaaacagcatgatatcagaagaagtagactttgcttctaatcatggtgggctgacaggagattctagagaagtgatgtggatggagttttttcggaaaatcattcctaaaaaatattcattagcacaaggtgtcatcattatcgactcagatggaaatcattctaacgaagtcgatattgccgtttttgatgagcagtatacgccgtatgtgttccaacacaattcgttgaagtttataccgattgaggcggttgcggttgctatagaatgtaaaagttcaaatttgaaagaaaaaggtttagaagaatggtctgaaaaaataaaacagttaacaccaaaaacaacaggaattgctagaatggctacaggttactttacaagtgaaagtaacacacaaaagaggacgcgtcctttactcattttagcaagtaactttaaaagagaagaggaccatacaatttcaaataaagcagctgaattagcggcgtcttttgatttcatgctcatgaaaaaaagcaatgaatttcaactaaaagtacctaatgaacatgaacatctaagatggtggtcaaacgaattaaattgtttcaaacaagaaaaacgatctaaggaagaagaaaaatttttagatgaaaacaaactcagcggtttacgtattgatggatacgatctgttaacgctaaacttccaattaaatcaattgctgatgctcatcaacaatcccatgtttttccctcactatgcatatgccgagctatttcagaaacagataacaaagtgaagaaaggagagcgacatgacaagggaatctagtaaacccaaaaccaattggcatgatgtgaaacatgcgattgacacgaaaattcatgaagaccaaagactttttaaagagccgctcactattcatttggttacgccaatgtttgggggagggccccaatcaaactcaattgatcaagacagaccgattcgtgaaagtgcaattcgtggacatcttcgtttctggtggcgtgcaactcgaggagctgcttgcaagaatgcaaatgaattatctaaacgagaagcagagatatttggtcatacagaaaaaagcagcttaattaaagtaatcgttgaagaaatatttaaagaaaaaaaacaaatcaaattccctccaacatatatttttcaaaaaacaccaaataaaatgtttatgggatatttcaaaatgaatgtgtatttgaccgagagtgcttcaatgacttcacaagacaaaaagaagttaggcaatgaaatcgaagctgcactatgggcgtggatcaattttgggggacttggtgcaagaacgagacgtggttgtgggagtttatactgtgaaacattttctcctaaagtgcaagaagtcagtaaggagcgatttgatcaatggtttaaagagaagatatgtcaatatgctatctctattcccgaagtgcctcgtgaatgggcaacgctaagctgggagtttagattacaaaataaagcttctcaaacgcatttatcctggactagaacaatggatacatacattgaatttcgtaaaaaacataatatccaaaatggggaggctgggagaagttattggcctgaggcagattccatacgtcatctagcgaatatgtcacatcctgatcatgaattaccatatccttcaaataaaccaaagagatatatcgcttttcctagggcgcaatttggtatgccgattgtttttaactttaaaaagaaatcgaaaaaagataaagagcgaagcgaagaagaaatagcaaaaagaaagtggtttcaaaaggagcctaatacaaagacgttagtcccgcgaaataaaaatcgtttggcttcaccactcatcttaaaaccgttagctattaatcaaaaggaatcagtgggcatggtgatggtgctgcagcaaccacagatcgaagctttatcgcttttaggaaaaggaaagcctttgcccaatgtgacagatgaacaaagtatctacccaacagccacctactcaaaaaacccattacaagacgagagtggccggacgcactcatcggcgattcaagcctttttacatagcaaggaggtgcaaacattttgtcagaagaatcacaaaaacaaacattaatgctattttcgatagggcctgttcaagaatttattgcgcaagcaaggcggacgcgtgatttatggtttggctcttttcttctatctgaattaagtaaagcaggtgcgaagaaatttcaggaactgggtggaacgcttattttccctgtgttcaacgaatcctctgcagaaccaaacaacgcaccaaataaaatattgggggaaatctcacacgaacagccttcatccgttgcaagacaagtaaaaaaagcagtatataacaagtggaaggaatacgcagactttgtaaaagagattgtggatccttatattcaaataggcacatggaatcgacaagtagatgatttattggaattttatgctgtgtggactgagatgcaaactcaagaggaagcggctaatgcgtccgcaagtccatatcatttggctcttcaagaagttgaaggtttaatggctgcaaggaagactttaagagattttaaacaaaatgaaccaggggcgttattcggtgaaccaaaatcatcacttgacggtggacgagagtctgttttccaaaagcaaaaaacaccacagcaagtggcgcaactagcgaaatggggaattggtgaacatgaatcattagatgcgatttcagtgatcaaacgattgtccttacataagcatccgagcaagacatttccatctgtctgcgataaagcttttgctccctatcaaaacatgttgaaacaaaatgaacagatgaagaaagcagccacacaatatgtgagagctgttgaaacgtattttgagaatatgaatctgacagtagctcctcttgatttgagtgaggcatcgcttttttatgaaagaagattagaagattatcttgaacaatgtggacttgttggaatagcacgaacagaagcgaaaaatgacatcacacagctgctcgaaaaatatttcaaaggtgaatacagcaagcatcacggccagccgatcaaaccaccagtaccttcaccttactatgcctttctcatggcggatggagataagatgggcagccaactgcgaaatatacagcatgtagaaagccatattgcattttctaaaacgctctcaacttttgcttcaaaggcaagtgagattatttccaaatgtgaaggtacattgatttatggtggtggagatgatgtcatggcttatgtaccggtgcaccaatgcttagaagcagctgggaaattacaaagtgaatttgtttcaacgatgaaggctcatcaacatagtgaaatacctccttcgatttcaattggcatcgccatcgtccatatgcttgagcctcttgaagaagtaagaagcatggcacgtcaggctgaacaatatgcgaaacaagagcggaattcattagcgattcatttccaaaagcgaggcggaggagacacaatgaatatctcagtctcatttcaaatagatccagtggcctctatccaagagatgacgacgtggttaaaacagtcttatttcacatctggctttgcatatggcttacgagagttgtatcaaacatacgaacagtcttcttttagaaaacagccggaaattttagatgaactcattccactagagataagacgtcttgcattcaaaaagaaaacggaagcaaaaacagagcaagaaacgaaagagtggatcgatcaattgattgcgaagtatataccgaagaagaatacattagaagaattacatacaatcgctgaatgtatgatcattgctcttcaactagaggaggtaagtggacatgcctgaaagatggtttcacattcaaccgcttgatccgctgcttattcgtgatgcacgcccatttcaaagtgtaccgggtatacgggcgcgttcactaaacgatgttccgccaagtgtggtcgcaggaacacttcgaacagcactagcgaagaaacgacaatcaatcaaacacaccacgccactttcttattatgcgaaatctcttgtgcgaggtcctttatatcgctggcatgatcatttatatgtgccaatgcctcatgaccttgagttattcgatgatgagtatgggatgaatcaagtgagaccgaagccaatgatgtcggaaggacagggcttttttggtacaggaaaaacaggccgttttaatgaggcattatggccgccaattggagctggtgctcgtaaaaaaatgaaatcgccgcctgcttttgtatcactaaagtggatggtgaactggctgacagacgcagtgaatgagagtcaggtgaaggaagccttgactgaataccaacatatgcagaaggaaaatcattctttcaaaaaggaaacaccaccggcatttattccagcattacagcgtcaggaacggacacaaattgaggtggaaactggcagtaaaaaggcaaaagatcagcatctattttcaacagaatcgctcttattcccagatgactttaaactggaggcgggaatagagttatctactgaagagtcagaagaattaaagcctttctcaagtcttcacccgataggtggtgaacgtcggctggctcatatagaagacaggcctcatgtataccaacaagattggacatgtccggatgctattaaagaatcgctcaaaaacaagctatatgttcgcatgatattggcgacacctgcttatttcagtaaaggatggcagcccggctggctggatgaacagctcatgtcaaaaccactatttgatacaaatgtacgactgaaattggtttgggcctctgttccacattggcagccaatctctggatggagcttagcaaataaagacaaagggcgtgaaaaagcaatacgccgcttagtccccgcgggtagcgtttacttctttatagtagaagaaggagatccagcagaactggccgaaaaaatgtggcttcaatcagtgtccgatcgaaaccggcgcaaagaagcgtttgatcgtgaagatggctgcgggttagcactttggggaacatggaagccgaatgaataagaggagtgagatgatggaagcaagccgttggttttggatacattgtttatccccccttcatattggagcgggtgaaggagttggcgtgattgatatgcccattcaacgagaaaaagtaacagaatggccgattatacctggaagcagtattaaaggcgtgcagcgtgaacattatcgcgcgaaaggacaagacacattcgtacaaaaagtatttggtacacaaggagatcaagatggaagcgcaggagcagtcgtcatgacagatggccggttattttcattcccggtggcgagtagatacggtacatttggatatgtggcaagtccactcatattgaaaagattagcccgcgatgcaaaagcattaggtgtatcgctggatatccctgatctcatagaagaatcaagcacgctagtcaccatgaattctaaattagtagagaatgatgaattatatctaggtgaatttcaaggggctgcgaaaaaatctccacaactaaccgattttgctaaaaagatggccaaacttttattcgacgataaacaatcacaaactctttggatagaacgatttgtcattgtaagtgatgacgtttttcaatacattgtcaccatgaattctgaagtgacacctcgtattagaattgatcatgaaaccaaaacagttagtaaaggtgctctctggtatgaagagtatgtaccagcagaagccatattttatgggctcatgtggtgtgatcgtgtcgatggaagcaatgatttatctgttagacatcaacttttaaatcaactagaaaaacagatgtatcttcaattaggtggaaacacaaacgtaggtaaaggaagagtatcctggcgtatgacaggaggggagggatcatgaaactcattcaacatcactatgctgagaaagcgtatcaacatgtgatgaatgccaaaacgaatgaggagaatttctcaaatcaatatggacaactctgtcacagattcgcctcaatgatcttaacaaatggattaaggctcaccattacattttttgaagcaaaatcaaaaaaaggaaatgcttatcaacaattcgttcaggatataaaagaaacactggatatacaaggagattggtcagcttccaaccgagattacttaatcaaatcaagacaagctttaagtgcatctgtttggttaaaaagatatgcggaatctattttaaaggtggaacaaggggcggaaaatgtggaggacatccaatgaatctgtcattaaccttaaacaaaagcaaatgggagattgatggttctacattgtcggacatcataaaggacagtgcgaagaagcagtcattttatgaaaatgtgattcgtctacatcgaaaacagtggggggaaaatcgcttattgtatgaaagatttgtggagcaatattataccgatacgaaccccacatgcctagtcaagtccatatcgccgttagtcattggacatggaggagagggtgtacttgaaacgggattgttattacacccgatatacggcattccttatttaccaggaacagctttaaaaggcgtagcctctcattatgcccattctgtattaggtgaaaactttgaagaactaaaacaaggtggtagtgattacaacacattgtttggaacaaacgaacgtgccggtatcatcgaatttcatgatgcgctcatgatgcctgagacagtaaaggaagcattcaaagtagatgtgatgacaccacatcattcaaactacaacagtgtcaagctagataagatgaacaaagagggaagtgttccagcccctcgagacgatgactcaccaacaccgattcatttcttaacggtggtcaacggccgctttcaacttctattgaaaacaaaaaagaatcgaccagaagaatcagaatggctcgaactcgccaaaaccatcttactaggagctttagaacacgaaggaatcggtgctaaaacaaatgcaggttatggaagacttaaaatggacgacgtcatttcataagactaagtgcgaatgtgaggtgaacataaaatccctagaacattcgcaccgtttcattcgacaaaaatgagaaaaaatgtatattttttaggtgtgaaaacaaacttctatatagaaacttaagggttttgacgattattccctaaaaaatgttataattagggcgaaaatcgcagtcgcactctatatgagtgcgtggattgaaatttgtaagaatacaatcctttactaaacgcatgattgtcgcactctacatgagtgcgtgggttgaaatctgaaccattagagttattaccactaccattcgggtcgtactctacatgagtgcgtggattgaaataaaactccttccaagtctgccaaatctgcattcttgtcgcaccctatatgagtgcatggattgaaatgcaaaggccagcatgtcgtcaagaaagctttgcgcgtcgcactctacatgagtggatggattaataattgcgaaaacataactctgcctcctgcctcagtagtcatgaatctaattgaattcaattgttgctgaaatataaagaagtatgattaacaagtttcaatagatttcatactaagaaaaagtcggtgcgaatgtgaggtgaacataaaatccctggaaccttcgcacctattcattcgacacaaatgagaaaaaatgtatattttttaagagtgaaaacaaacttctatatagaaacttaaggattttgacgatcatcccctaaaaaatgttataattagggcggaaatcgcagtcgcactctacgtgagtgcgtggattgaaatcatcaattatacttgaaataaataaagcgattaaaagtcgcactctacatgagtgcgtggattgaaatatcgatccttaccggatattgctccaggagtttagtgtcgcactctacatgagtgcgtggattgaaatcccttcaggggatgatttttcccttttgacatgtgtcgcactctacatgagtgtgtagattaataattgcgaaaaacataactctgcctctcagtagtcatgtatttaattaaattcaaagttgttgctgaaataataaatatgattatcaagattcaaatagttttcagactagaaaaagtcggtgcgaatgtgaggtgaacataaaatccctggaacattcgcactgtttcattcgacaaaaatgagaaaaaatgtatattttttaggagtgaaaacaaaattctatatagaaacttgaggattttgacgatcattccctaaaaaatgttataattagggagaaaatcgcagtcgcactctatatgagtgcgtggattgaaattaatcgtgacccgctgctcaggtgacatgtagtggtcgcactctatatgagtgcgtggattgaaattacaatcttcccaacctatacttgaaagaactttgtcgcattctacatgagtgcgtggattgaaatctattaaaagcgctatatgcctctaacagctccgtcgcactctacgtgagtgcgtggattgaaatggtgaatggtgggaaaagacaggaaagcctggtgtcgcactcaacataagtgcatagatcactgtttctgcgaattacataaattcaaatatctatccacttcaaaatctacacaaatgaataatcaaaataatgtactttccccctaaatccaggccctacacaacaaaaaaagactcgctcacacagagccgagtcttaattttttttgcagtttttcttcactgaaaatccagccggtataggaatttttgatttggtggtccatgtcgatatggcagatcgcgacaaaagggtagtgacctttgctgcggtagcgcaaatcaatgaaccgtacctcgtaatgatccttgtatttatccacttcccaccggtagacaggggagaaggagagaaaggctgagatgttttcgtcttgtttggcaattttcataatctctgtatcagggaccggcacacggttaaaggtgtctaaaatgacgatttccccattcatgctgcgcccaacatggaaagaagatttacatttcacggcaatgcgccattgtctgaacttcattgtaggcgaaataataatctcttcaatttcatcgaattgtgcacgcagctgatgtttaatctgaagctgcatgatcaccctgacgatatagtaacagaaaatcacggcatacagcgagatgaacgtatagccgggatgaccgccaatggcccaaacgacaatggcgacaaggtgtgtaaaaaagatgaaaggatcaaacgtgttaatgatcccaagcgctacccatttctttgaaaatggacgaatggcctgtgtgccgtatgcattgaaaatatcgacaaacacatggagcacaacggctaatagagtccataaccacagatgaagtaaatccgcccccggcacaaatgggaaaatcacagccggaatcagcaatgaccagaacagtacagctggaatggaatgtgtaaatcctctgtgatttcttatataaaccgcattattttttagttttagcacagtatcaatgtctggtgcttgggagccggcaatggtcgcgagcatcacggcatgtgccatgtgtggatctgcgctgacggctggatctaaaagtgcaagtcccccaagagaaatgcccattactacatgagtaccagtatccaattgattacctcctagttgtcatgcttaggaacaatcatacaaagtatacgtcttctttcaagactttgtgcaaaatcacttttgctttgtcctgatttaatgtaacatgttaacgtatctacaaacagtatacaacaaataaggttcttttcagaacgttagccctcggttcaatgagaaggagtatagatatgaaagacattcaagaaaagctggaccgcaaagatattgcgggctttcagcatgatttaattgattggtatgaaaaagaacaacggacactgccatggcgtgaaaatcaggatccataccgcgtctgggtatcagaagtgatgcttcagcaaacgagagtggatacggtcattccgtacttcaaccggtttatggagcaattcccgacggtgaaggatctcgctttagctgatgaagaaaaggtcatgaaagcatgggaaggtcttggctactactcaagagttcgtaatttacaggcagctgtgaaagaagtatatgaatcctacaggggcgttgtccctgattcgaaagagcagttttcaaagcttaaaggtgtaggtccgtatacgagcggtgcagtgctgagtatcgcctataacaagccgtaccctgcggtagacggcaacgtcatgagggtcatttcccgtattttgtctgtatgggatgatatagcaaaaccaaaaacgagaaatattttcgagtttgcggtcgatcagctcatttcccgggaaaagccttcagaattcaatcaagggctgatggagcttggtgcgctcatttgcaccccaacatcccctgcctgcctcatttgccctgtgaacatgcattgctcggcactagaggaaggcgttcagcatgagctcccagtgaaaagcaaaaagaaaaagccgactgcaaaatcaatggcagcagcggtgttatttgatgatgcaggcaacctatatattcataaacggccaagtacaggccttcttgcgaatttatgggaattccctaacatggaaaccatgaagggaagaaaaacggaaaaagagcagctggttaatttcttaaaagaggaggcgggtgtacaagcggagcttggtgatttagaaggcaccattcagcacgtatttacccacctcatctggaatatttctgttttctttggacgagttacctctgtatctgatgacacgatgctgaaaaaagtcacaacagaggaatttgaggcatatgctttgccagtctcacaccaaaaaatctggaagatggcacttgaagagcctagtcatatttaaccgttgtaccgtgggtataatcagcttcatttctatgcagacccccgcggtcttcgatttcagaaatgatttctcgatacttagattgcccttcttcgttcaaataaggtaaaatttgttggaaagcatgatgaaagtaagcaagctcagtatctttccattgatccttggacatcatgccaagctggcttaaatcgcgtccgacatacatgaatgtaacctcctaataggaactttcctattagtgtgaagcgaatgaacgaaaactattcaaatcaggagatgaaccataatgagtcaacgtaaatgtgcattaattacaggcagcagcagaggagtagggaaagaagttgcccttcgcctggctgaaaaaggatatgacattgtcattaactatgcgagaagcaaaaaagccgcacttgaaacagcggaagaaattgaagcgatgggcgtgaaaacattggttgtaaaagccaacgtaggtcagccagagaaaattaaagatatgtttcagcaaatcgatgaaacctttggccgtttagatgtatttgtgaacaatgcggcatcaggtgttcagcgtccaatcatggaccttgaagaaaatcattgggactggacgatgaatatcaatgcgaaggctttgttattctgcggacaagaagcggcgaaattaatggagaaaaatggcggcggacatatcgtcagcattagctcactaggctccatccgctaccttgaaaattacacagtggtcggcgtatcaaaagcggcactagaagctttaacgcgttacctatccgttgagctgtcacaaaaaaatattgtcgtgaacgcagtatcaggcggtgcgatcgatacagatgcactaaaacatttcccgaaccgggaagaacttttagaagatgcgaagaaaaatacacctgctggccgaatggtagaaattaaagacatggtcgacagcgtggagttccttgtatcaggcaaggcagacatgattagaggacagaccattattgtggatggcggacgttctttgctagtttaaaaaaatcatgaataggatgtacaccttctgcacaaattaatgtgcgtggaggtgataatgatggatcaacaacaaaacaaaacaaacgcacaacaagtgaagaaacaaaaccaagcttctgcacaaggcggtcaatttggtactgaatttgctagcgagactgacgtacagcaagtaaaaaaatacaaccaaaaagctgagcaaaacaaacaacaaaacagctaatcactgaaacaaaggaaagcacttcatctacgaatgaagtgcttttctttttgcctctccccaccatccgacaaaacctgtaaaacctctacataaacagtcaaaggatttcctccttctttcaagaaatggtatacagacaaaaagtggattcgatgaaaagggaggagttagatgtctgatttcgatcagcttgtaaaagaacaaatgcagctcatggatcaactgctcaatgtacagggagaactcgatctatgcttagaaacagaaaaacaattgctccaggatgaaaaaaaagaagagtggaccaggcttcatgatcaaatcaaacagaaacgggaggaactgcaaaaagtccaaaccttatttacaaaacagacagaagaggtcatcaattcatataaacagatggaaaagagttctagcgtgatgtaagtcagtgtgccgttcaattgggttgaatggctttttcatttcattttttaatgatgtaacggtataatataatagagacatgtttagttgggaaattaggtctttggactgttaggtttgtttgttatagaaagtaggggagaaaatatgggctatcccaaggaaggagaaaccatccaaattcaaagctataaacataatggcttgatccacaggatttggaatgaaaccaccattctgaaagcaacggaattgtgtatcattggtgcaaacgaccggacaatggtgactgaatccgacggccgtacttggatgacgagagaaccggctatttgctatttccatgcaaaacaatggtttaatgtaattgggatgcttagagatgatggggtatattattactgcaacatcagctctccttttgcgacagatgatgaggcaattaagtatattgattacgatttagatgtcaaagtctttccagacatgacgtacaatattttggatgaggatgaatatgcagatcataagaggcagatgaattatccaaaggaaatcgatagtatcttaagagagcatctgaatacattattgcattggattcaccagcggaaaggtccgtttgctcctgaatttgtggatatgtggtatgaacgttttttacattatacaaaataagcaagagcagcaaaaacctgtttggctttttaggctaacaggtttttgactgcgtacggataagaggcactgatagattgggaaggagatttacatgggggtcattaaacgctacatggcttttgttacaccgtataaaaaacagattgcattgacaatggtcatcgggatgatcaagttctcgattcccttaacattgcctctgcttttaaagtatgtcattgatgatgtcattcaaggctcggggtcggctgaagaaaagacatcatctctattaatcattatgggaatcatgctcgtcttatttttagtgatgaggccgcctgttgaatactatagacaatactacgcacagtggacaggcagtaaggtattatttgatattcgggaaaagctgttctcgcatattcaaaagctcagtcttcgttattatgccaacacgagaactggggaaattatttcaagggtcatcaacgatgtggagcagacaaaggagtttgtcatcacaggtcttatgaacatttggcttgatttgatgaccgtgctgatcgtgatcgccattatgtgtacactggacatcaagctcaccatcgtgtctgtcattatttttccgctatatgcgtttgctgtgaagtatttttacggcaggcttcgcaagctgacaaaagagcggtcgcaggcgctggctgaggtgcaagggcatctgcatgagcgggtacaaggaatgccagtcattcggagctttgccattgaagaatatgaacaagaacattttcatgatgaaaacaaaaatttcttaaacaaagcgatcaatcacacgaattggaacgccaaaacatttgccgtcgtcaataccatcactgacatcgcaccgctattaatcattgcatttgctggctacaccgtcattaatggatcgctttcgattggaaccatgattgcctttgtcggctatattgaccggatgtacaacccgattcgccgtctcattaactcatccacgactttaacccagtcagtggcgtcaatggatcgtatttttgaatttattgatgagccgtatgaggtcacagaccggccgaatgcaaaagaagctgatcatttaaaaggtggggtcgaatttaaaaatgtgtcgtttcgttatgaacacacacaggaagagattctgcacaatatctccttgaaagtagaaaaaggacaaacggttgcgcttgtaggaatgagcggtggagggaagtcgacactcgtcagcttaattccaagattttatgatgtgacaaacgggtctcttgaaattgacggcatcgatataaaagagtacaaagcaagaagccttcgaaatcaagtcggaatggtgctgcaggatacattcttattcagtgacacgattaaagaaaatattgctgttggagatccagaagcatcttttgaaaaaattgtttcggctgcaaaagcggcaaatgcccatgattttattatgtctcttcctgaaggatatgacacgaaggtaggagaacggggcgtgaagctgtcaggcggtcaaaaacaacgaatttctattgcaagggtctttctaaaaaatccaccgcttttgattttagatgaagcgacgtctgcacttgatttagaaagtgaacattacattcaagaagcgatgcaaaagctagcgaaggaccgcacaacctttattgtcgcgcaccgcttatcaacaattacacatgctgacctcattgtcgtcatggaacaaggcgaaattgtggaaaaaggaacacacgaagaattaatgaaccgagacagccactatcgccatctatttaccattcaaacattaaattagtagaagcctatccgattctagcggataggcttttttatgcttgtcaaaaacatgacatatttcccagcttgtctcaatacaattttaaaaagtatgacggggtggtgaatatgtgaaagaacaagacgtgctgctagatgtcaaacagctgtccattgcgtttcagcaaaaaaagcaaaaagtacccatcgtccatcacatatcgttctcgattcaaaaaggagaaaccttaggaattgttggcgaatctggctgcgggaaaagtatcacatctatgtcattaatgggattgaaccagcaaacagacacaacgggtaaagtccaattcgaagggcaaaacctgctgtcgctttcagaaaaacagtggcgagagataagaggaaatgacatttcgatgattttccaagagccaatgacctctctgaacccattaatgaccatcggcaaacaaatgacggaagcccttttcacacatcaagcaatcggtcaaaaagaagcaaaagcgaaggcgattgatcttcttcaaacagttgggttgaagcaagcggaatcgctgcttagaaaatatccacatgaattatcaggcggtatgcgccagcgagtcatgattgcgatggcaatgctttgtcatccaaagctcatgatcgctgacgaaccgacaactgcacttgatgtgaccatccaagcgcaaattcttcgtctgctcaaaaagctgaacgaagagatggacactgctattttatttattacccacgatctaggcgtcgtgcggcaaatatgccagcgagtcatgattatgtatgccggtcgaattgtagaagaaggaaccgttgaccgtatttttcaaaaacctctgcatccctacacaaaaggtcttttcgcctcagttccatcgtttaaagagaaaaaagaaaagctcatctctattacaggtcatgtacctaagccgggaaccattcgatccggctgtcaatttgcaccacgctgtccttatcaaatggcgcaatgtcttgaagaagatccagttttacaatccattgaaccggaccaccgcgtggcatgctttctaatggaaggaggagaagacactgagtcgcccactcttgcaagtgaatcagctgacaaaacggtatgacacagccgcttttttttctaaacacaaacattcgactctggctttaaatcaagtgtcctttcacgtgaaggagggggaaacgcttggcattgtcggtgaatcgggctgcgggaaatcaacacttggcaaaagcttaatgagattgactgaaccgacgtcaggctctattcaactgaaagggcaagaagtcactcttttgaaagaaagagagatgcgttctttaagaaaagacattcaaatgattttccaagatccatacgcttcattaaatccacgaatgaaaatcaaagatattttagaggaaccgctcattgttcataaacatgggacgaaagcagatagacgaaagcgggtcaaagagatgctgcacattgtcggatttgatccttcctacggggaacgttatgcgcaccaattcagcggcggacaaaggcagcgtattggtattgctagagcactcattacccatccaagtcttgtcattgccgatgaacccgtttcggctttagatgtatccgttcaagcacaaattttgaatttgatgcttgaattgcaaaagacgctttctctgacgtatctgtttatttctcacgatcttggtgttgtcaggtatatgagcgaccgaatcgcagtcatgtatgctggccgaattgtcgagatggggcctgccgaagacgtgtttcacagcccgcttcatccttatacgtcgctgcttctgaaatccattccacatatggatcacgtgctagagacgcaagatgtgtcagcagaagagtctgccatgacgccaagcggcggatgtcctttcttcaaaaggtgtccaaaaaggtgggagaaatgcctaaaagcagtacctgctttgtatgaggaggaaccggggcacgcagcggcgtgttacttatatcaaaaggaggaacacaatgaagaagacatggttgttcagtagtttcatttttgtgctggcacttgcactgtttttagggggatgctcgtccgcaccgtcatcagaagaaaaagcaacaaaagacaccctcgtatttggcagaggaggagactccacttcactagatccgatcacaacgacagaaggcgaaaccttcaaggtcacagagaatatgtttgaaaagctactgaattatggtgagaaagacacgaccatccatcctggtctcgcaacagactgggatgttgcaaaggacggaaaatcgtacacgttctacttgagagaaggtgtgaaatttcacgatggcacagactttaacgcagaagcagtgaaattcaactttgaccgctggatgaatggtgatgcagaaaaatttccttactatggcatgtttggcggctataaaaaagataaaggacatgtgattaaagacatcatcgtcaaaggagagcatgaagttgaatttcagctaaagcgcccgcaggcgacattccttaaaaacattgctatgtcaccgtttggcatcgcaagtcctgcggctgttgaaaaaagcggtgattcttttcgtgagaatccagtgggaacaggaccattcaagtttaaagagtggaagcaaaacgaccgtattgtgttagaaaagaacgaagattactggcagaaggataaaccaaaactgaatcaaatcatcttccgctctattccagaaaactcggctcgtttaaatgccctgaaaacaggtgagatcgatttgatggatggcgtgaatccgtcagatttagatggcattaaaactgataaagcactccagcttattgaaagaccatcaatgaacgtaggctatatcggactgaccgtcacaagaaagccgcttgataacaagctcgttcgtcaggcactcaattacgcggtcgataaagaatccatcattgagtcattttatggcggacttgccgagccagcaaaaaatcctcttcccccagctttagaaggctacaatgacgacattgatccatatccgtatgatccagaaaaagcgaaggaacttttgaaagaagcgggttttcctgacggctttcgcatcaagctttgggcgatgcctgtaccgcgtccatatatgccagatgggatgaaggtagcagaagtcattcaatcaaactttgaaaaggtcggcgtcaaagcagaaattgtgacatatgactgggcgacctatttagataaggcaagtaaaggggaagcagatgtgttcttattaggctggacaggggacaatggtgatcctgataatttcatctacacactgctggacaaagacagcattggcggcaacaactatacattcttcgaaaatgataaaatgcacgacatcctcattgaagcgcaaacaaatacagatcaaaagaaacgaaatgacctgtataaaaaagcgcaagaaatcattcatgatgaagcaccttggattccattggtgcattcgatcccaatgcttgcagcatctaatgatttaaaaggctatcagccgcatccaactggttcagaagctttaactgacgtgtatttcgaataagcaaataagggagatcttgtatctcccttattcaaacaaagaaaaaggcggtgaaagctgtttgtttgcttattgtatgaagcgggcaggaatgctcatcccagtattgattggaatgacattggtcgtgttttcaattattcggtttattccagggaacccagcacaggtcatcttaggacagcgggcaacgaaagaggcagtagaacaattaaccatccagctcggtttaaaccagccttggtatgttcaatacggacattacatgctggggcttttaaaaggggacttagggacttcgatacgaacaggagcggctattgcccaggaaatgaagccttacttatttgcaacgttagaattgaccttttttgccatggtgctggcgattgttgtgggagtgaatgccggaatcattagtgcttggtttaagcattccatctttgattatgtcgcaatgtttattgcactcattggagtgtctatgccgattttctggttaggcttaatggggcagtggctgttctcgatcgaattaggtattttgccgacgacgggccgagaaaacgtaaggaatccagtggagtcgatcacgtatattcatacgctggacacgcttttgcaaggccggtttgatcaattcactgacagcatcaagcatttggtattaccaagtacagcacttgcgacaattcctgctgcgattattgcgaggataacaagggcaagtatgctggaagtgcttcattcagattttattcgaacagcaaaagcaaaaggggtacgttcatttttcatcatttatcagcatgggctgaaaaatgcgcttattccgatcttaacgattattggtcttcagacaggcctcttgctaggcggagccattttaacagagaccatttttgcatggccgggcattgggcgatatatatatgatgccatcagctatcgggattacccagtcattcaaactggcattctcatcgttgcgctcatatttgtcctgatcaatttcattgtggacatcttgtatgcggtcattgatccaaggattaaatattagggagggagagtgataacatggaagcgcaaaaagagcttgaaccacctcaaccaaaagaagaacgctctcaatcattggttcttgaatcgatgaaactgttctttcagcacaagctggcggtcattggcagtgtgattgtctttttatttcttatcttagcaatattcgcaccgctcattgctccttttggaatcaatgaacaatctctcggtgagcgatttagtgcgccatcagctgcgcactggtttggtacagatgatttcggcagagatatattttcaagagttgtgcatggcgcgcggatttccttatgggttggtttcttctcggttctcgggtctgtcattttaggcacactgcttggattgatagcaggctatggcggaagagtgctagatgctgtgatctcgagagtgtttgatattttactcgcttttcctagtattctactagcgattgcgatcgtctccattttaggcccctccttacaaaatgcccttattgccattgcgattattaatgtcccaacctttgggcggctcgttcgttcaaaagtgctgagtattaaacaagaagaatacgtgctggcagcaaaggcggttgggatgtcacaccgccgcatcgtgctgcgtcacatactgccaaatagtatggtaccggtcatcgtacaggcgacgcttgcgatcggaacggcgattatcgaggcagccgctttaggcttcttaggattgggtgcacaggcaccaagcccagagtgggggaaaatgctcgccgatgcgagaccttatctcgtgcaagccccctggacattaattttcccaggtgtagcgatcatgctgacagttttgggctttaacttgatgggagatggattaagagacacactggatcctaaaatgaagaaaataaaataagaccgattctaggaatcggtctcagcgcgcagacaaaccctcgcattcggtgtcagtcctgcgtgccggtgctcactcacgaatgttcaattcgctccactccggtactcgtccttcctagactgcaaaggttttctatcacgctgaaaagaagacaaagggctaaaatcaagatcattttagccctttgtcaacaatctaagaccgattctaggaatcggtcttttctcaatttatgcttctttttcatctgtctcaatttcactgtcttttgggtgatacgtctggaagcttgtaatcaatgtatctaaatgctctagttcatcacggtattcgatgatgctggacatgacattcagcatattgtaatcgagcaagtcgttttcttggttttgctgatgctggataaatgatttcgttaacgtttcaaggcgaagagagcattcgttttgaaattcatcatcctgcggcttcatttttccgacaaacttcatcaaggtccgctcatgccaatacagtaaataatcaatctcatccgttaagctttcccggaaatgctctggcatcaaatgaatctcattttctaatttatgaagctttttcagcaagtaaagagcacgattcgatgccataatggcctgtctgaacaaaacgagctttcttgattttacataggttgttttctttaaatagcttcgttcctctttgtataacaagtaaatgtgatctaatttgatcatgcgttcttttatttgatcgatgtcatcctttaaagtggaatgatcagtagactgtctggagctcagacggatccattttaaaatctcctccgtattttccataatgtgatgaacaagctttgtttcatactttggcggcaggaagattaaattcactaaaaatgaagaaagaactcctaacaccacagtagctgttcgaattaaggcaaaggaaaggaaatgatccccagcactttctaaaatcgcaatgacggttacaagtgcaattggaatcgtgtgttcaatcttcagctttaaattaatggcgatgaccatgacggcggttaaaccgataatgactggcccagtgccaaaaagcagaccgaacgtaatggcaagtgctgctccaataatattggcttgcacttgatcaacaatcgttaaaaaagatcgataaatagatggctggatagcaaatacagctgcaattcccgcgaagacgggcgttggcagcccaagccatgttgccaggtaaagcgcgagtacaatggcaataccagtttttaaaatacgggctccaagtttcattggttttgtccctgcattcctttctttttgataatagatgatcactcgtcatttatcatcaatattttgatgaaacaactaagtaatatacagcggtcttccgaaatattcaagtgatttttgaaagttcatgaaaacatcaaaagaaggtattgagaagaaatgtaacagattcgcacgcttttgacaaacaagagctgataaataaaaaaacaggcgcattttttttcgcctgtttttgaccctattatgattgttttaactgttcaaacgcatgatctactgcttgcagcgtctcagaaatatctttttcagtatgtgcgatcgttaagaaccaagcttcatatttagaaggagcgaggttaatcccttgagaaagcattaatttgaagaagcgggcgaacatttcgccatccgtattttccgcctgttcatagtttacaatggtttcttttgtgaaataaatcgtgagagccccttttaagcggttcaccgtaatatctacttgatgtttttttgcatgggctaaaatgccttcttctagcatagcgccaagctgatcaaggcgctcgtaaacaccatcttgttttaacacttccaagcatgcaataccagaaagaatggatgcaggatttcctgccatcgtgccagcttgataggctggtccaagaggagcgacttgctccataatttcttttttaccgccgtaagcaccgatcggaagtccgccgccaatgatttttcctaatgcagtgaggtcaggttttacttgaagcaagtcctgtgctcctccgtacataaagcggaaagctgtaatcacttcatcatagatcacaagtgcgcccttttcatgagtgaggtcattgacctgctgcaagaagccgtccttaggctccacgatgccgaagttcccgacaattggctcgacaaggacagctgctacttcatcgccccatcgatccaatgcttctttgtagctgtcaatatcattaaatggaacggtaatgacttcattggcgatgctctttggtacgcctgctgaatcaggggttcctaaagtggaaggaccagagccagctgccacaagcacaagatcagagtggccgtgatagcatccggcaaacttaatgatctttgttctgcctgtatatgcgcgcgcgacacgaatcgttgtcatcaccgcttctgttcctgaattgacaaaacgaactttgtccaaagcaggcatggcttccttcagcattttagcaaaagtgacttcatgcttcgttggcgttccgtaaaggacacctgtttcagccgcttttgtaatagcttttgtaatatgcgggtgagcatgtcctgtaataattggaccgtatgctgctagataatcgatatagcggtttccatcaacatcccaaaaataagcgccttctcctctttccatagccacgggtgaaccgccgcctactgccttatatgaacgagacggactgttgacacctccaacgatatgctccagcgcctcttgatgtaatttttctgattctgtgaatttcataaatagcctcctatctcaacgtatcacgtcgtctatcattattttaacatgccgatgcaagcgtccttagttgaatatcctctcaaaattggataggctaattaaaaaataggttggagggattgtgtcatgacaatcgaaataggccagcaagtacctgaaatcgaattaaccggtgacaatggggagaaagtaaagctttctgactttaaaggaaaacatattgtcctttatttctatccaaaagatatgacaccaggctgtacaacagaagcatgtgatttccgcgaccgccatcaaagctttgcagaattagatgctgtcattatcggcgtaagcccagacagtcaggacaagcaccaaaagtttaaagaaaaacatgatttaccgttcctgcttcttgtagacgatgaacagaaattatctgaagcctttggggtatggaagctgaaaaagaactttggcaaagaatacatgggcattgaacgttcaacgtttcttattaataaagaaggaacgcttgtgaaagaatggcgaaaagtcaaggtgaaagaccacgtagaagaagcgcttgaggaactgaaagctcacgcttaatatcatcacaggatgagatcggcagacatgccggtcttttttgtgaagaagaataggtaaaaaagaggattgtaattgacaaagattcggctctgggggtacactatttataaagattataatataagaatatttttgaagagaggtgcatgatgaaatggctgctcacgaactaaaagacgctttagatgctttaaaagaaaccggtgttcgaattactccgcagcgccatgccatcttggagtttctcgtaaattctatgactcacccaaccgcggacgatatatataaagcacttgaaggaaaatttccaaacatgagtgtcgcaacggtttacaacaatttacgagtcttccgggaatctggattagtaaaggaattaacgtacggtgattcctcaagccgatttgattttgcgacatctgaccattaccatgcgatttgtgaaaactgcggaaaaatagtggactttcattatcctggccttgatgaagtagaacagcttgcatcccatgtgacgggctttaaggtcagtcatcatcgcttggagatctatggaacttgtcaagaatgtgcgaaaaaagaaaatcattaatgaaaaagctgaccggttaaatggtcagctttttttatgacttttttcgattgtaggattcatcaaactctttgccttctaatgctggatcgagtgtaagcggctctctgcaatgcatgcacatatccacccgcccaagcacttttgtttctttctcacagcctggacaaacgacacgtactgccttcgtagaaagcataccaatccaaaagtaaacggctgtacttaatccgatcgataagacgccgagcagcataaagaaagtcgacagccagatcgattccttgaagaacacaccgatatacatgatcagaaagccaacaaaaaccaaactaagtgcaaatgttctgattttattaattttactggagtatttcgccatccctagtcccccttgtctccaatatagcacattttacctttccgtttgaattagttatagagttttgtgaataaattgcttataatgattcaatgatcttttttcttgtattgaaggaattttgattctatgaggagaaatacatagcattagagaagaactttacacccgagtattggaggaatcactatggaaaatcttctccgtcctatttatcaagagagagcaagccatccagacacattagctgtgattatagtagaaagaagacacaaagtatcttctgagacggataactttgatgcagcacttctagtcattgtaaaagaagcggaagagccgttatttatcaagcactatgaatccgatcaccaaacagcttctttaaatgttgtcacagatgatcagctgaaggaatggattaccctcggcactaaccgccgaatcattgattggattttgaatgggaaagtcctatttgatcgaaatgaatatattttcaacttgattgatgaactgagtacattcccgttttcaaaccgcaaacttaaaatcggtttagaatacggcaagctcattcgcagatatatagaaggaaaagcattttttgagtcaaatcaattccttgatgcatataattcaattgtgcatgctctgcatcatttggcacgtattgaagtgatcgataaaggcttccacccagaagtgacggtttggaatcaggtgcgtcatatggagccggaagtatataaactttattcagaactcattgaaagccacgaaagtctgcataagcgtttggaacttttatttttagcaaatgattttttgatccattcaaaagcagaaattggtgccgctcatttgcgtcatgtcatggaacagcaagatatatggctttttggcgagcttctcgcgcatcctgatctcaagtatttcacgcctgaccttagcgtcatgattgatttctttgtggaaaaaggaattgttcaagtggagccgattgagacaaagggacaaaaaatctatcatcgaggatattttgtgaaaaaagatattgacgcatgaatattatgatggtatattattatacgtcgctaacgagcaaccaagttgctttgaaagaaaagctgacaaaaagaaattataaaaaacacttgacgcacacagcgccgaaatgttatattgagaaagtcgcctctgagcgacaatgaagatgatctttgaaaactaaacaagacaaaacgtacctgttaattcgattttttataaaaaaatcctatgaaacatcataggtagtcagtcaaactggcgaggcaggaaatgatcacatgctaagttcgctacatcgtgtagcgacgcatgtgtgatatgcatcctgcatacctcggagagtttgatcctggctcaggacgaataaaaactcgaattaacaggtacgttttgtcttgtttagttttcaaagatcatcttcgccgttcttagcggctttaataatataacatttcgcttcatcttatgtcaacaacttttttcaagtttatttcccgaagcgttttgtgtttgtcactgtgtgtcagcgacgattaataatatatcacgaaaatattctatcggtcaacgccttttcaaaactttttttaaaatagttttattgtgcatctcaaacccttgtcctgcatacaatcaagtaacaatctcggacaaggcaggagtgtttgaattgagtcgattatatgtgttgcctattaaacggctgaagcaaattgtcattattcttgtagcagcccttgcagctgcaacctttttttatgtacaaaaggcaccgccgctgtcggtatttaaaacagaacacggaccccgagccatttataaaggcgagacttcctcaaaacatgtctcccttacttttaatatcggctggggagatgagaaggctgttcctattttaaatgtccttcgagagtacgatataaagaacgctactttctttctgtctgcttcttgggctgagcgtcatcctgatatcgtcaaacaaattagagaggacggtcaccaaatcggcagccttggctatgcttataaaaattatagccagcttgaagatagtgaaatcaagcaagatcttgtccgggcacaaaattcatttcaaaagcttggactagatgacattcaactattaagaccgccaactgggcaatttaacgaaaaagcattgaaaattgccacacagtacggttataccgttgtccattacagcgtcaactcacaagattggctgaatccgggcgtcgatcagattgttcagaatgtaaatgatcgaatgaaaagcggagatattgttctcctacatgcctcagattcagcaacccaaaccgctcaagccttaccagctattttgaaacaaatcaaagaaaagaatttaaaaaatgtgacggttggcgaactgatctccaataccaaaacaaggtcatcggaagttaagtagctttcgcctttgaaaaccgcggcatagctaacaactgaaacgcattacagcctaatagcggaaatagcattaaatacagccagtcctcttcgttgactctgagcgccgggaaccattctagcgacgtgatgacaaccatgagaaacattgcggaaacaaaagttttcttagaggactgctgctgtttaaagtaagccacgatcaatgcgaacacaccgataaagacaggcagccataggtatggaagaaatgattcattctccccgaaaaacaaaaaccgcaagtaagctaaatcaaacagcacaaagatcaccagaaacagctgaatggtattccatagagaatgtgatcggaatatctctaacgcaaaccggtgcaccgttaaaaagacaacaaaccccatctgactaatgacactaaaaatcatccccacaccaatgaaccaaaacaacacagatgcgatttctagtatttcaaacgatataaaaagcttctgatatttcccccactccagcgcaaagccaaccacgcttgtaatgaccgctccaacagctagcacagagaagaaaaaacgaactaaatcccgacttttcattgaattgatccaacccctatttttgttatgtataaatttacgtgaaacattcatattaaaagtaagacatgtaacgaaaggagccacagtatgtcaaaaggcatcttgcgtataatgagctgttttctccttttatctctaacagcttgtgctcccaaaacccaatcctcatctaatatggactatgacgaaacaaagaaaatggtcgtcgatatattgaagacagatgacggtaaaaaggccattcaacagttattaaatgacgaggcaatgaatgaagctttggtaatggatgaacaaactgtgaaaaaaacgatagagaaaacactgacttctgataaaggcaaagagttctggaagaaggtctttgaggattctaaatttgccgagactttcgcaaaatccatgcagcaacagcatgaaaagatgttaaaacagttaatgaaggaccctgactatcagcaattgatgatggatattctcaaggatcccgaaatggaaaagaaatacggtgaactggtgaaaagcaaagagttcagaaagcacttagaaaaagtcattacagaaacattaagcagtcctctttataagaagaaattcgaagatgagcttaaaaaagcagcatctgaaagcagtgattccggatcaaaaggcagcgaagaaagcggcagttaaacatcacccgaggggacattcatccactcgggctttcattatgcttttactgctaattgttcaataactttattcgcaatgtgttgatacacttctcccgtcggatgactcgcatcatagacagatggagcaaaatcatcttcattccaatcaggctgccttagaggaatttgaccaaggaccgatactcgcagctcttccgccagcttatccccgcctccttttccaaagacatattctttctcacctgtttttttgctttcataatagctcatattctcaacgacacccagcacctcgtgatctgtttgcagtgccattgcgcctgctctagcagcaacgaaggcagctgtaggatgcggtgttgtgacaatgatctctttacagcttggaagcattgtatgaatatcaagcgccacatctcccgttccaggcggaaggtctaatagtaagtaatctaattctccccactcgacttcgtggaagaagttattcagcattttaccaagcatcggtcctctccaaatgaccggtgcattttcttcaacaaaaaagcccattgaaattactttgacaccaaagcgttccacaggaataattttttcccctttaacagttggtctgacggtgattcccatcatatccggtacactaaagccataaatatctgcatcaatcagtccgacttttttccctagacgagccagtgctacagcaaggttaacagacacggtggatttcccaacgccgccctttccactcgcaatcgcaaggaactcaggcggatttttagagttgagcaggttttcttcctcatcttgcgaaggcataaacctttcaagtgtttcctgaggcagctcttcaaaacgaagtcctactgtgttagcaccctctgctttcaaggcttgtacgatgtcttgctgaagcttcatctgctcagcagtgcccgttttggcaatagccacctttaagctcacatgttctttctcaggctttaggctgatttccttgatggcatccagctcaccaagcggtatatgaaggaaaggttcgtccatcttcccaactagttttctcacatcatcttgtccgatcatagcagaacctcaccctttattgaattcgtttacaatccaagtatatcatacatatccttacaatgtctgtcctgtttgcctgcgtacaaaaggaaaaagccccttattcaggcggctctttttgctctgtcaaatatcttaaaatgcctttataaatggaggcagcaatttgatcttgatatttaggtgttgccagctgactggcctctttcggattggagagaaatccaatttccacaagagctcctggcttcgtcacgttttgcattaaataaatgccattgatccgcttcgcctttcgatctgtgttttcaagattattgcgtaattcatcttgtatgaacttcgctgccttttcattctcttcatatttcccgtaaaaaaacgtctgtgcgccgctccatttgttcgatgggatcgcatttaaatgaatacttaaatagagatcggcttcagactcattgatggcttttacacggtttcttagatcctccgctttctttcgggcatatccctttgtattctttgatgataaatcagaatcatcctcgcgggtcataagaacaagggcaccctgctcctgtaaatagtcacgtatcttcatggatacatccagtgcaatctctttttcaagcaactctcctcctacagccccgccatctggaccgccatgacccggatctaaatagatgattttgccgctcaaaggcaagttccacgatttccacgaatcatcatttagaaactgaaacctgaataagaataagaggacaataaacccgattaaaaaccctgtccatttcagctttcttttcatccctgtccctcccatacaccattattttatagatatgggacaagggctggaaatatgcttagtgcagccgaagcttatgccttttttctgattctcgaaagccttcctgccaccacatgcttaaaaaatccttcgcaaatggatacagacacgacatcttcctctccattcggaacatattcccccacgattgcaaacatcctgctagctcctcaaccagctcatcttcctcctgggaggaccgcttcttgatatggtcgaacgattcgccgtatttactcgactcaccgtatctcccgccagctaaaaaagcttcaatggcgaaatcgatacagccatcactcataatcccagctggatcatctgcaaatgggaacagcttcttcgtgaatttctcggaagcaaccgtgacctgttgaagagacaatgtacgcaacagcttcttttcaagcgtgacatctcgttttgttttcaattgataaaatgaaagaacctctgccatggactgaactccttttttctttgtattgttcgttggtttgaacaaaacatgcagttcagtaaatggaaatcaatgagctaatggattggaaaattgtgataagatgaacatttatatatagaaagaatggcaaaggagcaaaatcaatgaagaaatggatgtatatcctgctgctactaacagtcgtcttatctggatgcagcagtcaagcgaccaagcagaagagcgacataaaaggaatagaagacatatccttaaaacagctttccaagcacaaaaattcttacattggagacaacggagcaatcggcgctattttatcagatcttccaggtaacgtgattcgcgagtatgaaatcgtagatgaaaaagcgctaaaagtgacatacggcgtgaaagaaaatgccaatgatacagaagaacaatttgatacattttggtttgataagaaggataccattgaaaaaaactacttatataatgcattggcactttttattcttatcgataacgtaaagcaagtaacacttaatatgagctctaaagacgagtcgtccgtcacgtttaaaagaaaacagctagaaaaacagctccctcactcttttaaagtttacaaagacgatacagcgctttggcaaaaggaattggttgatggagttgtgaagtcaaaagagaaacgccaagatgtatacaaagtgtttccaatgcagaaataataaaacagaggggtatctccctctgtttttttgatgattatgtagtaaaagccttaattaaacgttgtctaaagttttgatccactgctgtagtaagcataaattcattgaatacttcctcaatccagtgagaattgtccgctttcggatcattgataaatagagagagggatatagaggatgtatgtgtttttcgatataaagaacctgtgaaaacaaacaatgttgctccgcctttataccaaagatattgatctgtttccgtcttgaatgtttctcccagcacaatttggctaaaaagacgcttttcttctgttgttaacagctcatcctgtagacgtttcataaaatgtgcatattgattagttgtagactttgtcattttttgcgtcagtaatgattgaatccgcaagcttaacaagtcttttttcatcaatttttcttctaacgcctttttatgctctgggtcatttttcatgatattgaaaatctcaatcatcagagatttgtattgttcatcagtcacatcgctcatttgcttgaatgcatcccgctcatgatcagatatataggctggccacaacaacttgggtgtcagtggcatgacttcatcatgttctgtaagaccttcttgtttcatctgatcattgatcttatctaagtcgagcaagtctatcaaataatcagtacaagcattcgaactgaattgcatcatccctttggcaacatctaataaagttgcatgctcagaaaaatcgttgacctccagccagtatgtatgagcaccaccgtctgttctatcaatataaaaccgctctatatcagacaatgccactttttcatctagcttgatgccgccactggagacagatttgacaaaatgaaataaaaccattaatttcaccgtacttgcaagtggtgttttttgatcaccattccaatctaacaccacgtcatcattttcaatgattgtcactgatacgtcctttttgttttttgcgacaaatgtcaaaagatcttccttcgttttcttcatatctcttttatacagcaagatttgaaccattacgtaaagtatgaccacaccaataacaacgagaccgattttgagtaacatgtttctcctttccaaataacagaggatttacatattcaatataacaaatatttcaaataaaggcgcaaaaaagcagaagttcgcgaatccctccacttcttgatgttcttattgatggggcagatgcagtttcatcccatcatgcgtagcttcaaaccctaatttttcataaaaacggtgtgcatctggtctctgtttgtctgttgttagctgaatcatatgacagccgcggtcacttgcgtgttgaatagccttttttatcaacatcgtgccaattccttttcctctatgagtcgaggccgtacgaactccttctattgaagctctccatcctccttgatgtgtaagaaatggcgtcatggttaattggagaacacctacagcttcttcctgatcacacgcaacaatgagttcaatatttggatcagcatctattgaatgaaaggcttcgatatagctttctaacaatggttgcgtgtaacgctctcttttttgacctaacatatcatccgcgagcatgaagacgattttatcgagatcatccagcttggcttctctgaacgtcagttgactgaaccccattgaacacacctcctatgaaatgaagtggaacttattgaccaaaataccattgatgcgcgttcttatataagatgtggtcagctgctttttcatcaaagagctgttgaatcaactcaacatcaccgtattcaaatggacgctttgctcttgtcgatggaaggtctgtaccaaacatcaatgcatcaggattcgtttgataaatggacgtcaacgcatgttccacgtttaaatcaacgcgtccaaaacctgttgctttcactcgaacccctttatcaaccagcttgagcaaatgcggcaaaccttcttccgataagcctaaatgatcaatcgaaacggccggcagctgttcaagcgtagatgagatgtcagggagatgcttagcgtctatgtagagctcactatgccagcctgccagctcatacacccttctcgcaaaataatcgagcttcgaaatatcctccgaaccgccccgcttcacattaaaacgtaaagccttcaccccatgttgatccaaatgaacaatctcatcatcagttgctgtaaaaggtaattgagtcacaccgcaaaaagacggccccatttcatccagcgccttcaacaaatagccttggtcaaagccttgaaatgaccctgacacgattgctccacctaaaatcccaaaatcagccgtctctctcctatagtcattcaccacataactatgcggtgtatatccttggttttcttgaatgggaaaatcaaaatcaatgatatgaaaatgtgcatcaaagatcctcatgcgcgcgcccctcttctgcttatttgatctgattatatcaatagcgaaagccaagagatatttgaaatgacgaatcacttcatatcatgaaaacttatcaagttttccattcctctcgtaagatggcatagtaaaattcatcccaccactcatttccttgaggtatacactttttaaaatacccttctcttctcatccccattttctccatcactctccacgatggcacattttcaggctgacaagtggcaatgattcgatgtaaattcattgtgtgaaagccataatgtagtacagcataagcagcttctgatgcatagcctttgttttgatatgcaggattgaagacccacccaatttcatatgtgtgctcaccaaagtacggatgaaacgcgatatgcccaatgcatgtatgatcttcttttaataggacagcgacatacttagcattttcatgacgattatttttgataaattccttcgcatcttctttagaaaatacatcttccggaatatacttcatcactgtcggatcagatgtatatgcataaacatcctgccaatcatcatcagtaaatggtcgaatgagacacctttctgtcgttagattcataggacaacctccataaataatcttcttttaaacagaaaactttctatactcatattttatacgtatccaaaaggaagtgaccagtcattatttattaaataaaaagcacaaaaaaaagcaccagcaggatgctgatgcttttaatatatggtttgtctgtaacaaacctttgtaaaacgtccatacaatataaaattgattaacgttttgagaactgaggagctctacgtgctcctttaagaccgtatttcttacgctctttcatacgagggtcacgagtaagaagtccagcacgtttaagtgatgtacggtactcaggatctacttctagaagagcacgagagataccgtgacgaattgctccagcttgaccagagaatccaccaccgtgaaccgttacaagaacatcgtagctgttagctgtttctgtgatgttcaaaggctgtttcacgtcttcgattaaagcagcgaatggaatgtattcagtaatttcacgattattaacgacgatacggccttcacctggaactaagcgaacgcgcgctacagaacttttacgacgacctgtaccgtaatattgaacctgtgccaaattgttaacctcccttataattaaccgcgaagttcgtaaacttcaggttgttgtgcttgatgtggatgctcagaaccacggtacacatttaattttttgaacatttgacggcctaatggaccctttggaagcatacctttgatagcaagctccaacattttttcagggtagtttgtacgcatctcaagagcagttctttgtttcaaaccacctgggtgcattgtgtgacggtagtaaattttgtccgtcaatttcttacctgttaattcgattttctcagcattgatgatgatgacgtgatcacctgtatcaacgtgtggtgtataagttggtttgtgcttaccgcgcaaaagtgatgctacttcagtagaaagacgacctagagtcttgcctgccgcatcaacaactagccatttgcgctcaattgtgcttgcgttcgccattggtgttgtacgcatgagtttccctcctaaataaatcaatgatttttccttgaatcaaatgctacgttctatttcaaaacacaagataagtcttccggggcttatttgtggggttgaaatacataccatatgatatcttataactttctgcttcctgtgtcaagaacatgttacacctggtttagttgtcatagaaaacttcccataaatacagtccgtgactgggcgcagtcttgcctgccgcttcgcgatttcgggcggcaagcatggcttttatctcatcagggtgaaatttaccagatccgatttcaagtaacgttccagcgataattcgcaccatgttgtataaaaagccatttcctctcacacgcatttcaagcccgtctgagacgtttttccactcgagggtgtaaatctcccttaccttgtcctgaacctctgtattggccgcacaaaagcttgtgaagtcgtgtgtgccaatgaggtgtccagcagcttctctcattttgtctgcatccagccggtaaggaaagtggcaggcatactgtctcgtgaacacattttggtgcgtttccgttgagaccttataacggtactccttcgaaacgacactaaaacgtgcatgaaacgactcatccacttcctcagcctttagaaccctgatgtcatccggcaggagactattgagggcaaaaggccatctttccatcggaatcgagagcggcgtgtcgaaatggatgatctgccccttcgcatggacgccgctgtccgtccggccagaagccacaatcggaatcagttcatcctgtttatgcattcttgcaagagccgactcgatctccgtctgaacagtccgctgcccaggctgcacctgatagcctttaaaatgtgtcccatcgtaggagacggtacatttgaccttcatctaggaatcacctaatttctcagaagcacaaggagtgctgttaacaggatgaataggagcagcgtgaacgtgtctttcatgccccagacaagctgacggtatttcgtccgcccttctcccccgcggtagcctctcgcttccatagcggtcgccagttcctctgcacgcttaaacgcactgacgaaaagcggaacaagcaaaggaacaattgctttcatgcggtcctttagaggtccgcttgtaaaatcaacacctcttgccatttgtgccttcatgattttgtccgtctcttctagtaaagttggaataaaccgaagagagatggacatcatgagagcaagctcgtgaacaggcagtttgattttacggaatggatgaagcagcttttccataccgtctgtcacttctataggcgttgtggttaacgtcagaagtgtcgtcatcatgatgagatagacaaaacggagtgaaatgaaaatcccctgctttagaccttcttcataaatatttaaaaaaccaaagtgaaatagcaaggcgccatcctttgtcatgaatatatgcagaatgaaggtaaacaggacaatccataggatcggcttcattcccttgagaataaagtatagcggcacctgagaaaccatcaccacaaggagggtaaagacacctaaaagcccgtaagtgatgtaattattagcaaaaaagacaataaagacaaaaaagaaaattgataacagctttgtccttggatcaagacgatggacaaaggatgaacctggcacatatttgccgataatcatactatccatcatgatgtcgtgtcctcctgataaagagctgttaaggcttctgccatttcatccatggtcagaagcggccttggaaacgtaatacccagcttttcttctacagtctgctggaatttaatcgtttctgggaggtcgagaccaaacgaagacatgtctgtacgattggcaaacaattctctcggcgtacctgtcgcctttaccgttcctttatgcatcacaatcatttgatccgcataatgagcggcgtcctccatactgtgtgtaaccagaatcgtggtaaggtttgccttttgatgaagctcatagaacatgtccatgatttccttccgtccgcgtggatctaaccctgcagtcggctcatccagcacaagcacttctggctccatcgctagaacacctgcaatcgccacacgtctcatttgaccgccgcttagttcaaagggagatcgagataatagggattcaggaagaccgactagcttcagcatttccttcgcctttgcttctgccttttcctgaggaacaccgaaattcatcggaccaaagcagatatcctttaggatcgtttcttcaaagagctgatgctcaggaaactgaaacacgatgcctacttttttccggagggactttaaatccttctgctttttattggcttgtaagacggtatctccaagcgcaatgctccccttcgttggtttgagcaatccatttaagtgctgcagcaatgtggacttgccagagcctgtatgaccaatgacagcgacataactgccctcttggatggaagcattgacatcatacaaagcgagacgctcaaacggcgttttcatttgataacgatgctctagttctttgatcgtaatgtccatagctctttcaccaatccttcttgtgtcaaatgggcatttgcaagcggtacaccttgctgcttcaattgtttgctcaaccgataggagaatggcagatcaagtccaatttgaactagctgttcgtctagttcaaatacttcctctggggttccctcggcaaattttttcccgccattcatgacaatgacccggtctgccttggcggcctcgtctaaatcatgtgtgatggaaatgactgtgaccgttccttgttccttcaatagtctaacagtctctaacacttcttcacggccaatcggatcaagcatcgatgttgcttcatccagtatcatgatgtcagggcttgcggcaagaacacctgcaatggcaactctctgcttttgcccgcctgatagatggtgcggctcttgatcaagaaactcctgcatattgacctgtttgacagcccaatctacacgttctatcatcaattcccgctcaaccccgttattttctaaaccaaaagccacatcatcacgaaccgttgagccaacgaattggttatctgggttttgaaagaccattccgacctttttgcgaatatcccagacactctcttctttcagctcaatctctccaaccttgaccgttccagcatccggtaaaatgagcccattcagtacacgggcaagtgtggatttacctgaaccgttatgaccaacaatggcgagccattcattttgattcacatgcaatgacacttgatctaaagcgggcttgtccgcatccttgtgataacgaaatacaatgtcctttacgtcaactaatgtcttccccatctctaccggacctcctctcagctcaacctcttcttttgcttattgttaaaaagccgtagtatctaaaaaagggcatagatccagttatgaactgtcccgccctttcttagatacacgctatgtgattaaactaattcaatgacagccattggtgcgccatcgccgcgacgaggtccaagcttcatgatacgagtgtatccaccttggcgatcttcgtagcgagttgcaacgtcagcgaataatttttgaagtgcatcttggtttgtttcagcgttagctacttcattacgaatgtaagctgcagcttgacggcgagcatgaagatctccgcgtttgccaagagtgatcattttttcaactacagagcgaagttctttcgcacgtgtttcagttgtttcgatgcgttcgttgatgatcaaatcagtcgttaggtcacgaagcattgctttacgttgtgcactagtgcgtcctagctttctgtatgccatgtgatgtcccctccttagttagagaatgctgtatgaataaaaaacacacgaaaatcctagttcacaatgaaactagtcaatcgtctttacgaagacccagtccaagttcttctagtttcgctttcacttcttcaagagatttacgtccaaggttacgaactttcatcatatcctcttctgtcttgttagcaagctcttgaacagtgttaatacccgcacgcttcaaacagttgtaagaacgaacagaaagatcaagctcttcaattgtcatttcaagcactttttctttttggtcttcttctttctcaaccatgatttcagcatgctgagcttcgtcagttaacccaacgaaaatattcaggtgttcagttaaaatcttagaacctagagcgatcgcttctttcggtcctgtgcttccatcagtccatacatctagtgttaatttatcatagtttgtgatttgcccgacacgggtgttctccacttgataagtcacacgagatacaggtgtatagattgagtcgatcggaatcacaccgattggctgatcgtctcttttgtttgcatcagcaggattatacccgcgacctctttgtgcagttaagcgaacacggaagctcgcattcttgccaagagttgcgatgtgaagatctggatttaagatttcaatatcgctgtcgtgtgtaatatcagcagctgttacagtaccttcatcttgtacatcaatttcaagcgtcttctcttcttcagagtagattttgagtgcaagctttttaatgtttaagataatcgttgtaacatcttcaaccacgccttcgatcgttgagaattcgtgtaagacaccatctatctggatcgatgttacagctgcaccaggaagtgaggataaaaggatacgacgaagggagttccctaaagtggtaccatatccacgctcaagtggctctacgacaaacttgccatacttggcatcgtcgctgatttcaaccgtttcgatttttggtttttcaatttcgatcatctaataaaaccctccttcaaaacgtcgaaacctcgaatagaatcatatgagattccatccgaaattcctcattgtttagtcccgtatgtgctcaggcaacgagtcgtgtattcgtctcataaataactgtatcataacccattattgacagggacacaaaatctatacaaacaaattacacgcggcgacgttttggtggacggcatccgttatgaggaactggagttacgtctctgattgcagtaacttcaagacctgcagcttgaagtgcacgaattgcagcttcacgaccagaaccaggacctttaacagttacttcaagtgttttaagaccatgttcgatagaacctttagcagcagtttcagcagccatttgtgcagcgaaaggagtagatttacgagaacctctgaatcctaatgcaccagcacttgaccaagaaattgcgtttccatgaacatcagtaatcgttacaatcgtgttgttgaaagtggaacggatatgagcgattccagcttcaatattctttttcacgcgacgtttacgcgtattttgtttacgagcagcagccattctttaactacctcctttacttattttttcttgttagctacagtacgacgcggacctttacgagtacgcgcgttgttttttgtgttttgtccacgaacaggaagtcctctacgatgacggattccgcggtagcttccgatttcaattagacgcttaatgttaagtgaaacttcacgacgaaggtcaccttctactttaagtttgtcaatgatatcacggattttaccaagttcgtcttcagttagatcgcgaacgcgagtgtcttcagaaacacctgcttctttaaggacttgttgcgcagtcgtacgaccaattccaaaaacatatgttaaagaaatgacaacacgtttatcacgtggaatatctacaccagcaatacgagccatgatttgggcacctccttgttattagccttgtttttgtttatgttttgggttttcacagatcaccattacttttccttttctgcgaataactttacatttttcacagataggtttaacagatggtctcactttcatgtgtttccaacctccttcttccggagttgctttatttgtaacggtacgtaattctaccacgagttaagtcatatggagataattctaccgtaactttgtctccaggtaaaatgcgaatgaagtgcatacggatttttcctgatacatgagccaaaactgtatgaccattctctagttcaactttgaacattgcatttggcaaagtttctgctacagtaccttccacttcaattacatcgtctttcgccattcaagtgttctcccttcttcaaatcagtaacttgctctctgacaaatgtccaaatgagttcatctcaattgtccatccatcacccgacctgttttgaatatactgttctgaacttccggagatacgcaaccataaaaggttatatgattgatattttttcttaggagaatgaaatttacgcttttctccgtctgcgattagtagatggcagccaccgaacatgccgatgacacctgtatactgatcttgttctttcctttggactatacagacaacctgcccgatttgggcctgaaaggcttcagtgaagacctaaatcttagtcagtatatcaaaacctgtatctgtaatcgcaatcgtatgctcaaagtgagcacactttttcccatcaaccgttacaaccgtccagttatcagccaatgttttcacatatcggctgcctgcgttcaccatcggttcgatggccaacaccattccaggttttagccgcgggcctttgttgggcggaccataatgaggaatttgagggtcctcatgaagatcctgtccgaccccatgtccaacatattctctaacaactgagaaattctcgttttctacatacgtttgtatagcatgggaaatgttcgacagacgttcgcctggctttgcttcctgtaagcctttatatagagattcctctgtgacttccagtagtttgcggtcttcatcactgattaccccaactggataagtccaagcagagtcaccatgatagccatttaactttgcgccaatatcgatactaatgatgtcaccatcacgtaaaacccgtttaccaggaataccgtgaacgagttcttcattcaccgaaacgcaaatgctcccgcgaaaaccattataccctttaaaagatgggattgcaccctgctttgtaataaaacgttcggcaatttgatccaattcttttgtcgaaatacctggttttatatgtttcttcagctcttcatgagtcagtgcgacaatgcgtccagcttctctcataatctcaagctcgcgaggagttttacagataatcatttatttaatcccccaagcaggtccttgatatctgcatatacatcgttaatgtgttttgcaccatcaatatttgcaagatatcctttttctgaatagaagttcagtaaaggttcagtctgctttaagtttacttcaagtctagtcgaaacggtttctgcattatcatctgcacgttgataaagctcgcctccacacttatcgcaaacattttctttcgcaggtggattgaatactaaatgatatgttgctccgcaatttttgcaaattcttcggccagtcagacgctccatcaaagcatctttatcgactttaatattaatgacataatcaatcgttctgccaagatcctttagaatgtcttctaaagcttcagcctgagcgactgttcgcggaaatccgtccagaagaaaaccttgttcacaatcatttttgccaagtctttctctaacaataccgattgtgacctcatcaggaacaagctctcctttatcgataaaggattttgcttcgagcccaagttgtgtctcctctttcatagcagcgcggaacatatctcctgttgatatatgaggtatcccataatcatcaacaattcgttctgcctgagtgcctttaccggcacccggaagccccattaagactaagttcatttcggatttccccttccttacttagagaggttgggcaggagcccagccctctattttatttcataaatccacggtagtttcgtttcactaattggctttcaagttgtttcattgtttcaagtgcaacacctacaacaatgagaagacttgtgccgccaatttgtgcagcggaaggtaatccagcgaattgaatgaaaaagataggaagtattgaaatcacggctaagaaaatggcgcccacaaacgtgagtcggtacaaaatgctcgtaattctatcttgagtcattttccctggacgaactcccgggatatagccaccctgcttttgcagattttcagccatttgttcaggattcacttggacaaaggcataaaaatatgtgaaagcaacaatcagtgctacataaatcgtcataccgattggcttagtatagtcaaagttgttggttatccaagttgtcacattattggttccgaagaacgatgcgaccgtctgcggagtaataatgaaagaaacggcaaagatgactggaatcacccctgctggattcactttcaatggaaggtgcgttgcttgactagcagacatttgtgcacggccagttccttttgaatattgaatcgcaatctttctcactgccatttgaatgtaaataacaccaataacaatgacaagaatagcaataacaataagggcaattttcaggatttgcatgaacaactgtccatctccacctacaaattgttgagcgtacacttgttttaatgtttgagggatacctgcgatgataccagcaaagataataatcgaaataccgttaccaacaccgtgagcagtaatctgctctcctagccacattaaaaatgctgttcccgcagtgagtacgaccgcaattaagaggtacgttgaaacacctgggttttcaatcagcatgcctcctgccatattgttgaatccatatgacattcctaacgcctggataaaacctagaacaattgtaaaataccttgtgaattgtgctaattttcggcggccaacctctccttgctttgaccactcagtgaacttcggaacaacatccatctgcaagagctgaatgatgatcgaagcagtgatatacggcataatccccattgcaagaatggagaattggaaaagtgcaccgcccccaaacgtgttgaggatcccgaaaacactcatttgatcctgtgcctggagaacttcggcgttcacattaggcacagggatgaaagcacctatacgaaagacgattaacattaaaagagtgaatataatcttattccgtatatctttcacgcgcataaaattggagattgtcttaaacaagttagatcacctcggctgtaccgccagcagcttcaatagcttctttcgcagaagcagagaatttattggcttttacagttaattttttttctaatttaccgttgccaagaatttttactcctgcttttaacttgcttattgcaccagtctctagaagaagttcaggagttacttccgttccttcgtcaaaactgtttaatctgtctaagttgataaccgcgtaatctttacggttgatgtttgtaaaaccacgttttggaagacgttggaataaaggcatttgaccaccttcgaaaccagggcgtacaccgccgccagaacgagcgttttgacctttatgacctttaccagaagttttaccgttacctgatccaataccacgaccaacacggttgcgtactttacgtgaaccttctgaaggcttcaattcatgaagtttcatttgggcacctccttatcgattaaaaatgttttattgttctttaacagaaactaaatgagacaccttgttaatcatgccgcggatcgctgcattgtcttcatgtacgactgtttggtttgttttcttaagaccaagagtacgaacagtgacacgctgatcttctgggcgaccgattacactgcgtttgagggtaatttctaatttatttgccattaatgttccctccttatcctaacaggtcttctacagattttccacgaagcttcgcaacgtcttcagcacgtttaagttcacttaaaccctgaagtgttgcgcggatcatgttgatcggtgtattagaacctagagatttagaaaggatatcagctagaccagcaagctcaagaaccgcacgcactgggcctccagcgataactcctgtaccttctgaagcaggcttcaatagaacgtttcctgcaccgaatcgaccgatgatttcatgtggaattgtagttccaaccattggtacttcaattaaattctttttcgcatcttcaacagctttgcggatcgcttctggtacttcttgtgctttaccagtaccgaaacctacatgaccgtttttgtcaccgacaacaactaaagctgcaaaacggaaacgacgtccacctttaacaactttcgctacgcggttaaccgtaactaagcgttcttctaactctaatttgctttggtcaatacgactcattcggatgtgtccctccttcttttattaaaatttaagtccagcctcacgagcagcttcagctagagcttttacacgtccatgatataagtatcctccgcggtcaaataccacgttagagattcctttttcaacagcacgttttgcaacaagttcgccaactttagtagcagctgcagcgtcagaactattctcgatctttaactctttatcaagagtagaagcacttacaagtgttacaccgttaacatcatcaattacttgagcgtagatgttcttgttagaacggaaaacgttaaggcgaggtctttcagcagtacctgaaagtttcgcacgaacacgagcgtgtcttttaagacgagtagcgtttttgctagttttcgtaatcatccgagtcactcctttcttcacattaagcgatcttacttaccagtttttccttctttacggcgaacgaattcaccttcgtaacgaattcctttacctttgtaaggctctggagaacggacagcgcggatgttagaagctagagctcccacacgctctttatcgatacctttaatgactactttcgtttgagatggaacttcgacttcaactccagcctcaggaacgatttcaactggatgagagtatccaacgttaagaacaagtttgtttccagatttagctgcacggtaaccgacaccgataagttctaaacctctttcgaaacctttagatacaccttcaaccatgtttgcaattaagctacgtgttgtaccatgtaaagcacggtgttctttatgatcagacggacggcttacagttaagacgctgtcctcaattttaatttccatatcagggtgaaatgtacgagttagttcaccttttggtccctttactgtcactgtgttatcgttgtttgtcacagtaactcctgaagggatctcgattaattttttacctatacgagacataccaagcacctccattcatcttaaactttttttaccatacgtaagcaagtacttctccaccagcttgtttagcacgggcttctttgtccgataaaacaccttgtgatgtagaaataattgcgattccaagtccgttaagtacacgtggtacttcatttgatttcgcatatacacgtaaaccaggtttactgattctttttagaccagtgataacacgctcgttgttttggccatatttaaggaacatacggataattccttgtttgctgtcttcaacatattcaacgtcacggataaaaccttcacgctttaagatttcagcaatttctcttttgatttttgaagccggtacttctagcttctcatgacgtaccatgttcgcattgcgaatacgagtcagcaaatctgcaatcggatctgtcataaccattatttaataacctccttcccatttatggggattaccagctggcttttttaacgccaggaatttgtcctttatatgcaagttcgcggaaacaaatacggcaaagtttaaacttgcgaattactgaatgtggacgtccacaacgttcgcagcgcgtatactcttgaactttaaacttttgtttgcgttgttgtttcgcaatcatagactttttagccacgatttcgcctccctttcattgattatttctggaacggcatacctacttgagttaataactcacgtgcttcttcgtccgtattggcagtcgtaacgataacgatatccataccgcggacttttgttactttatcgtaatcaatttctgggaagattaactgttctttaataccaagcgtgtagtttccacgaccgtcgaaagatttcttagaaatcccgcggaagtcacgtacacgtggtaaagatacagaaataagtttatcaaggaaatcgtacatgcgctctccgcgaagtgttactttcgcaccgattggcattccttcacgtagacggaatccagcaatagacttcttcgcacgagtaacgacaggtttttgaccagcgataaacgttaattcttcaacagcagtatcgattgctttagcgttttgaacagcgtcaccaacacccatgttgatcacgattttttcgatttttggcacttgcattactgatttgtattcaaacttagaaactaatgcaggtgtaatttcttttacatacttttctttaaggcggttcatgagaaagacctcccttccttatttactatttatctagaacttgcccagattttttcgctacacggactttctttccgtcctcaactttatacccaacacgtgtcacttcacccgttttaggatcaagcggcattacgtttgatacgtggatcggcgcttcttgttcagaaattccgccctgagggttagcttgggttggtttagagtgttttttcacaaggttaataccttctactaaaacacggtcattcttagggaaagcagcaaggatgactccttgtttacctttatctttaccagagataaccactactttatcgccctttttaacatgcatttaatcgcacctccttgagtcgcggattgtattcattaaagtacttctggtgctagagaaacaattttcatatagttgttttcacgaagttcacgtgctactggtccgaagatacgagttccacgcgggctcttgtcgtcacggataatgacacatgcattttcatcgaaactgatgtaagatccatcgtttctgcgagctccgctctttgtacgaacgataactgctttcacaacttcaccttttttgacaacgcctcctggtgttgcttgtttaaccgtacaaacaatgacatcaccgatgttagccgtcttacgtccagagccaccaagaactttaatcgttagtacttcgcgtgcgccagagttgtcagctacttttaaacgagtctcctgttgaatcattaatgttacctcctttcggaaaaagaaatccgaactttattagataataacggcttcttcgacaacttcaactagacgaaagcgtttagtcgcagataaaggacgagtttccatgacctttacgatgtctccgatttttgcttggttgttttcatcatgtgctttgaacttcttagagtatcttacacgtttgccataaagtgaatgctttttgtatgtttcaactacaacagtgatggttttatccattttgtcagaaacaacacgaccttgatacactttacgttggttacgttcgctcatgtttgcggggcctcccctctaattattatttattagcagcgatttctctttgacgaatcacagttttcatgcgtgcgattgatttacgcacttcacgaatgcgagcagtgttttcaagctgcccagtcgctaattggaaacgaagattgaaaagttcttctttaagagactttactttttgttcaatttcagcagtggtaaggtcacgaatttcattagctttcatttgattcaccaccaatttcttcacgttttacgaacttcgttttaattggcaatttgtgagatgcaagacgaagagcttcacgagcaacttcttcagacacaccagaaatttcaaataaaactttgcccggttttactacagctacccatccttctggagcacctttaccggaacccatgcggacttctagaggtttagctgtgtatggcttagaagggaaaattttaatccaaactttaccgccacgtttcatgtaacgagtcatagcaatacgagcagcttcgatttgacggttcgtgatccaagaagcttcaagagcttggataccgtactcaccgaaatgtacttcagtgccaccttttgcacgaccacgcattttcccacgatgttctctgcgatacttcacgcgttttggcaataacatattattttcctccttccgcagtattcttcttagttggaaggacttctccacgatagatccatacttttacgccaagcttaccataagtagtgtcagcttcagcagtagcatagtcgatgtcagcacgaagtgtgtgcaacggaacagtaccttcactgtaatattcagaacgagcaatatctgcaccgccaagacgaccagaaaccattgttttgattccttgtgctccagcacgcattgtgcgttggattgtttgtttttgtgcacgacggaatgaaatacgattttcaagttgacgagcgatgttttcagcaactagctgagcatcaagatctgctctcttgatttcaagaatgttgatgtgtacacgtttgccagttaggctgttaagagctttacgaagtgcttcaacttcagatccgcctttaccaattaccatacctggtttagccgtgtggattgtgatatttacgcggtttgcagcacgttcgatttctactttagaaacagacgcgtcagacaaacgcttgctgatgaattcacggattttcaagtcttcatgtaagaagtcagcgtaatcttttcctgcgaaccatttagattcccaatcacgaatgacgccaatacgaagacctactggatttaccttttgacccacggattatccctccttcttttctgatacaacgattgtaatgtggctagtacgtttgttaattgcgctcgcacgacccatagcacgtggacggaatctcttaagtgttggaccttcgtcaacgaatgcttgagtaatcactaggctgttagcgtccaactcgtagttgtgctcagcgtttgcgatagcagattttaatactttttcaataattggtgaagcagccttaggtgtaaggtttaagatagaaactgcttctcctacttgcttacctcggatcaggtccattactagacgtgctttacgaggagcaatacggactgttcttgcgacagctttagcttgcatttaaaagcctcctctcattagcgtcttgtttttttatcgtcactagcatgacctttgtaagtacggcttggtgcgaattcgcccaatttgtgacctaccatatcttcagaaatgaaaacaggtacatgtttgcgtccgtcatagacagcgattgtgtgaccgatgaattgtgggaaaattgtagaacgacgagaccaagtttttacgacttgctttttgtcagtttcattcaatttctcgactttagccatcaaatgatcatcaacaaatggtcctttttttaagctgcgagccattgtggaacctcccttcgtgattgaactacggccctaaatgaaccgtagacaaccccgttacttgtttttacgacgacgtacaatgaatttatcagacttgttggttttcttacgagtcttgaatccaagagtcggtttaccccatggagacattggtgatttacgtccgattggagcgcgtccttcaccaccaccgtgtgggtgatcgttagggttcattacagaaccacgaactgttgggcgtacgcctttccagcgagaacgtccagctttaccgatgttaattaattcgtgttgctcgtttccaacttgaccgatagtcgcacggcaagcagaaagaatcatgcgaacttctcctgagttcaaacgtacaagaacgtatttaccttctttaccaagaacttgagcagaagtaccagcagaacgaactaattgtccacctttacctggttttaattcaatgttatgcacaactgtaccaactgggatgttgataagtggaagagcattacctggtttgatgtcagcttctggtccagaagtaacttcagtaccaacttggattcctttcggagcaagaatgtaacgtttctcaccatctgcatagtttacaagagcgatgttcgctgaacggtttggatcatactcgattgtagcaacgcgtccaggtataccgtctttatcacgcttaaagtcgatgatacggtattgacgtttatgaccgccaccttgatgacgaacagtcaatctaccttggttgttacgtccgccttttctgtgaagcggtgcaagcaacgatttttctggtttgtcagtcgtgatttcagcaaaatctgaagtagtcatgccacgacgaccattactggttggtttatactttttaatcgccattttgaatttccctccttctttttaagatttacgcttcaaaaatttcgatttctttgctgtcagcagttaatttcacgatcgcttttctgcgacggctagtcataccagtgtagcgtccaacgcgtttagatttccctttgtagttttgaacgttgactttctcaactttcactccaaagatttcttcaacagcgtctttcacttctgttttgttagctctgacatcaacttcgaacgtgtacttcttctctgtcattagatcagcagaacgttcagtaatgatagggcgctttagaacatcacgaggatctttcattatgcaagtccctcctctactttttcaaccgctgctttagtgatcagaagtttgtcgtggttgacaacgtcaagaacgttgataccgttagcttcaacaactgttactccagggatgttacgagcagataaagcaactgtttcgtttgcatccgcagtgacgatcaacgctttcttctcaacagataatcctttaaggatgcctgcgaattctttcgttttcactgcatcaagagtcaaatcttcaagaacgatgatgttgttgtcgattactttagaagacaatactgacttgatagccaagcggcgaacttttttaggtaatttatatgaataactgcgtggtgttggaccgaatacgataccgcctccgcgccattgtggtgaacgaatagaaccttgacgagcacgacctgtacccttctgtctccaaggcttacgacctccgccacgtacttcagaacgagtttttactttatgagttccttgacgtaaggaagctctttgcataagaatagcatcgaatactacgctttcgtttggctcgattccaaacacagaagcgtttaattcgatttcaccgttagtagaaccgttttggttaaataatgctacttttggcatgacttgtttcctcctttcctaagagagttatttagatttaactgcactctttacagttactagagattttttagctcctggtacatttcctttgatcaatagtagattgcgttctgcatcaactttaacgatctcaaggttttggacagtgatttgctctccgcccatacgacctggaagaagtttacctttgaatactcggtttggatcaacaggtcccattgaaccaggacgacggtggtaacgtgaaccgtgagtcattggtccgcgtgattgtccgtggcgcttgatagccccttggaatcctttaccttttgatgttcctgttacatctacgatatctccatttgcgaaaatatcaactttgacttcctgaccaacttcatacgcatctaactccgcaccgcgtaattcttttacgaagcgcttaggagcagtttccgctttagcaacgtggcccttctctggtttgttagaaagcttttcacgtttgtcgtcaaaaccgatttggattgcttcatagccatccgtgtcagtagtcttcttttgaagaacaacgttagcagcagcctcaacaacagttacagggataagatcaccgttttctgcgaatacttgcgtcataccaatttttctacctaagattcctttggtcattagtcacacctcctataatatgtgttttctatttgaattaaagtttgatttcgatatctacaccagatggtaaatctaaacgcataagtgcatcaactgtttgtggagttggattcacgatgtcgattagacgtttgtgagtacgcatctcaaattgctcacgagaatctttgtacttatgcaccgcacgaaggattgtgtaaactgatttttcagttggaagcgggattggaccagatacactagcaccagaacgcttagccgtttcaacaatcttctcagcagattgatcaagaattctatgatcatatgcttttaaacgaatacgaattttttgttttgccattattttccctccttttcgcctacttacgttagacagttctccgtgagaaaaacctgatcaccttgccatggcaaagcggccgggtgtgtcagcaacctctcacttcatcgcagtcaaagaccaacatgcactattgtaccaaattggcctgcgtgttgcaataataaatcggataaatttatgatttgcacacttttcatattatacaggggttcagcctataaatcaagctttccctgaagatgatgtacagcagtcttttttatggtacggataaattcttctggttcttctagatgcggggaatgtgcagattctttaaaggtgaaccattctttgattggtgctgttaattggtcaacatatggttttgatacagcagctggtgtaatcatgtcatatgcgccaatgataaagtagcaaggtattaatatagtagaaactcggtattcaatgctctcattcatcaattcatcccatagcatgtcctgactaaacttctgtcctttaaggaacttccacttatctttcagctgatattccttactaaaaagaaatccgcgcagcatttgaataagcggcctccacctatgtgtgagacctacgctgccgagctctttatatagagagaacagagcatgagctgatattcgtttccacggaggaggcgtcagtaatcgcaggcaccaagtaaacaaccgattccgatggtatttctccaaaaggagctcgtacgacataatatcttcttttaatacatctactacctgactaattccataataagcatgatatagatctggacgcttatgtactgcttgtatggcgattagtgatccccatgaatatcctgcgatgtacaattttgattgacctagatatgaaaggactttctctgtcagttcaatcgtatcttcaataaattgctgaatggtcatggaagtatcggggagattcttttgataggaaagtcccgcgcctcgctgatcccaatgaactactgtaaaatcttgattaagttcctcatgaaacgagtcgatatagctgatttgagcggagccgggcccaccgtgtaaaaataaaagaacaggtttcgcttcatttgtgtgatcttctttgatcataatccattggtcaaccccgccgattaaccatttcttcaaatatatcttcgccattccagtgatcctctcggttccaattagattctatagcttatagtagccgttctgatctggaaaagcaaaaaaagagacccttttgcaaggagtctcttttatatgttttattacttaatgatagttgaaacgacgccagaacctacagtacgtccaccctcacggatagagaaacgagttccttcttcgatagcgatagtagagataagttcaacttccatctcagtgttatcgccaggcattaccatttcagtaccttctggaagatgtacgataccagttacgtcagttgtacggaagtagaactgcggacggtagttagcgaagaatggagtatgacgtccaccctcttctttagaaagtacataaacttcagctttgaaacggctatgtggagtgattgtacctggtttagcaagtacttgaccacgttggatatcttcacgagatacaccacgaagtagtgcaccgatgttgtcaccagcttcagcatagtcaagaagcttacggaacatttcaacacctgtaacagttgttttaccgttttcttcttgaagaccgatgatttcaacttcgtcaccgactttaacttgtccacgctcaacacgaccagtagcaactgttccacgaccagtgattgagaatacgtcctcaactggcatcatgaatggcttctcagtgtcacgctctggagttgggatgtactcatcaaccgcatccataagttcgaagatttttgcttcgtaatcagcatcaccttcaagagctttaagagcagaacctttgataacaggtacatcgtcaccagggaagtcatagtcagaaagaaggtcacgaacttccatttcaacaagttcaagtaactcttcatcgtcaaccatgtcacatttgttaaggaatactacgatgtatggtacacctacgttacgagaaagtaggatgtgctcacgtgtttgtggcattggaccatcagcagcagatactactaagatcgcgccgtccatttgagcagcaccagtgatcatgtttttaacatagtcagcgtgtcctgggcagtctacgtgtgcatagtgacgagtttcagtttcatactcaacgtgtgctgttgagattgtgattccacgctcgcgctcttctggagcaccatcgatttggtcataagccatagccgtacctttaccagatttcttatgaagaactgttgagatagcagcagttagagttgttttaccatggtcaacgtgtccaattgtaccaatgttagcatgcgatttggaacggtcgaatttttctttagccattctaaaaatcctccttaaaggttcattgtatttggtatagagtgatagaaagtgaagagttacctctcactttctgatcttcaatagtagttatactttagtttaaaggcaaaatcaattattcacctttattttttttgatgatttcttcactgatgctcttaggcacttcttcgtagtgatccatgtgcatagtgaaagtaccgcgtccttgtgtattagaacggagtgcagttgcatatccgaacatttcagaaagtggaaccattgcgcgaacaacttgagcgttaccgcgagcttccataccttctacacgtccacgacgagatgtgatatcacccatgatgtctcccatgtattcttcagggataacgacttccactttcatcattggctcaagtagaactgggttacatttgctgacagcatttttcaatgccatagatgcagcaattttaaacgccatttcgttagagtcaacatcgtggtaagatccatcaaataattttgctttgatgtcgattaatgggaatccagctaatacaccattttcaagtgaatcttcaagacctgcttgaatagctggaatgtattcacgaggaacaaccccaccgacgattgcattttggaattcgaagcctgcgccttcttcgtttggttcgaattcgatccaaacgtgtccgaactgaccacgtccaccagactgacgtacgaatttaccttcaacttttgcaccagaacggaatgtttcacggtacgcaacttgaggagctcctacgttagcttcaaccttgaactcacgcttcatacggtcaacaatgatatcaaggtgaagctcacccataccagagatgatcgtttgaccagtttcagtgtttgtttgtgtacggaatgttggatcctcttcagctagtttagctaaagcgatacccattttatcttggtcagccttagacttaggctcgattgctacatcgataactggctctgggaattccatagactcaaggataacaagacttttctcgtcacaaagagtgtcaccagttgatgtatctttaagacctacagctgctgcgatatcccctgcatatacagtagagatttcttcacggctgtttgcgtgcatttgaaggatacgtccaacacgttcacgcttgttcttagaagagttcttcacgtaagaaccagaatcaagtgttccagagtatacacggaagaaagttagtttcccaacataagggtcagtcattactttaaaagcaagggctgcgaatggtgcgtcatcagtagactcacgcacaacctcttcatttgaatctggcaaggtacctttgattgcagcaacatcagttggtgcaggaaggtaatcaagcacagcgtcaagtacaagctgaacacctttgtttttgaaagcagatccaacaagaactggatagaattcaacattcaacgttcctttacggattgcagctttcaattcaggaattgtaatttcttcaccctcaaggtatttttccataagctcttcgtcaagctcagcgacagcttcaattaggctgttgcgaagctcttcagctttgtctttatactcagcagggatttcttgtgcatcagagcgagttccaaggtcatcttcgtagaagtatgctacgttttctacaaggtcgatgattccttcgaattgatcttcagcgccgatcggcaattgaattgcatgagcgttcgcttgaagacgatctcttaatgtgcctacagagtaaaggaagtccgcacctgttttatccattttgttaatgaatacgatacgaggtactccgtaagttgttgcttggcgccaaactgtttcagtttgtggctctacacctgattgtgcatctagaacagtaaccgcaccatcaagtacacgtaaagaacgttcaacttcaactgtgaagtctacgtgtcctggtgtatcgatgatgtttacacggtaacctttccattgtgctgtagtagcagcagaagtgattgtaataccacgttcttgctcctgctccatccagtccatttgggaagctccttcgtgagtttcgccaattttatggatacgaccagtgtagtataagatacgctcagtcgttgtcgttttaccggcatcgatgtgagccatgataccaatattacgagttttgtctaaggagaactctcttgccattgggtaatttctccttccttattagggaatagtttttttagtttggtataaatcctaccagcggtagtgagcgaatgctttgttcgcttctgccattttgtgtgtatcttcacgtttcttaacagcagcaccagtgttgttagctgcgtcaaggatttcgttagcaagacgctcttccatcgttttttctccacgaagacgagcgtagtttactaaccagcgaagacctaaagtagtacgacggtctgggcgaacttctacaggaacttggtagttggctccacctacacgacgtgctttaacttcaagaactggcatgatgtttttcaaggcttgttcgaaaacctccatcgcttcattaccagtacgttctttgatgatatcaaatgacttgtagagaattgtttgtgactttcctcttttaccgtcgatcatcattttgttgatcaaacgagatacaagtttagaattgtaaattggatctggcaatacgtctctttttgctacaggacctttacgtggcatctgatagcctcccttctcatttaaaaggatttctatctgtctctcatctcaatatcattgtcagttgcctgactccactgatctgatatcaacttctaaaaacccttatgtttgtttgtattatttgctttgtttagggcgttttgttccgtatttagaacgtccttgcatacgaccgtcaactccggcagtatcaagcgcaccacgaacgatgtggtaacgtacacccggtaagtcttttacacgtccgccacggataagtactacactgtgctcttgtagattatgtccgataccaggaatgtaagctgttacctcaatcaggttagacaaacgtacacgagcatatttacgtagtgctgagtttggttttttcggtgtcattgtaccgacacgagtacaaaccccgcgcttctgtggagatgttacgttagtgtgctcttttttgaaactgttgtatcctttgttaagtgcaggagactttgagttttcaactttactcacgcgtcctttgcgtattagctgattaattgtaggcatgttgttattcctcccttcgttgctttttttataacccacatacccaggtggttcatcaaaaggcaaaaaacaatgcttttgcatttacacatgcaaaaacaaaacaagtacgctataacataatggcaacagctgctgccccaacttcaattccgcaggctttgccgagctttttcatggaatctaccactaaaatgtctacacccttctcttgcgctagttttattacactagctgttaaagcaggatcagcatctttcgctacgacgatttcctttactgaatctcgtttcagagcttttactgtttgcttcgtaccaataataatggattgagcctgtgatactttatcataagacatcgaatatcctccaaagtaacaggttttattttgagcaccttggttatattatcatcatggcagaaggatgtcaatatcatatgacagattatcttgacatccttcaccattttttgatgattttataggaatctcacgagaaagattactctacaggaaccatatcgtcagacggctgcacttgtgaaaccggcttaaccttacggtagtttggcattcctgttccagctggaacaagtttaccgatgataacattctctttcaagccaagcagttcatcacgttttcctttgatcgccgcatctgttaggacacgagtcgtttcttggaaggatgccgcagacaagaatgagtctgtttcaagcgatgcttttgtaataccaagaagaactggacggcctgttgcaggacgtttgccttcgaatagtacttttttgttcgcttcagtgaattgatgtacatcaagaagtgtgcctggtaatacatctgtatcccctgcatcagcgacacgcactttacgaagcatttggcgaaccattacctcaacgtgcttatctccgatttctaccccttgcatacggtatactttttgtacttcatgaagcagatattcttgaacagctgtcatgtcagtcactttaagaagttctttcggatcgatcgaaccttctgtcagtacttgaccacgagtgactttgtcaccttcaacaactttcagacgcgcattgtaaggagctgtgtaagaacgagtttcaacgtcgccttgaaccacaatttcctgctgcttgtcacgaacatcgttaatttcagcaacgacaccatcaatttcagaaatggtcgcttgccctttcggattacgcgcttcaaatagctcttggatacgaggtaaaccttgtgtgatatcgtctcctgctaccccgccggtgtggaacgtacgcattgtaagctgtgttcctggctcaccgattgattgagcagcaatgattccaactgcttcaccgacttcaacgtcagtaccagttgcaaggttacggccgtagcatcgtttacatacaccatgaggcgtgttacatgtaaatgcagaacggatccatacttcctcaattcctgcttcaactacttcaagtgctttatcttcatcaattagttcgttttcgtccacaatgacttcgcccgtttcaggatgaacaattggttttcttgcaaaacgtccgatcagacgttcttcaagcttctcaataatttcatttccttctctaatggacttcgccaagataccacggtctgtaccgcaatctgtttcacggatgataacatcctgtgcaacatcgacgagacgacgcgtaaggtaacctgagtcagctgttttaagggctgtatcggcaagacctttacgcgctccgtgagtggaaataaagtattccaatacggttaaaccttcacggaaactagatttaatcggaagttcaatgatacgtccagccgggttggccatcagaccacgcataccagccagctgagtgaagttagatgcgttaccacgcgctccagagtcactcatcatgtagattgggttgacttcatcaagggacttcatcagtttaccttggatgacatctttagaagaactccagatcgaaatgactctctcgtaacgctcttcttcagtaatcaaaccacgtctgaattgcttcaagacgttatctacttttgcttgtgcttcttcgaggatcttctgcttatcatctaatacgacgatgtcagacacaccaaccgtaatacccgctttagtagagtatttgaaaccaagatttttcatgcggtcaagcattttagatgtctcagtgatatggaatctcttaaagatttccgcaatgattttacctaaaataccttttttgaacggcgcattgatttcttgtttctcgatcgcagctttgacatcctcacctttttcaaggaagaagcggtcaggcgttttttcttcaatattgctctttgtcggctcattcatgtaagggaatgattccggtaagatttcgttaaagatcagttttccaactgttgtaatcaacaatttagaacgctgttcatcagtgaatgtcacattcttcaacgagctagctgcaacagctacacgtgtatgaagatgcacatacccattttgataagctagaagggcttcgtcagtatctttgaagaccataccttctccgatagcacctttacgctcaagtgtaaggtagtagttaccaagcaccatatcctgagatggcgtaacaacaggttttccatctttcgggttcaaaatgttttgagcagcaagcattaagatacgagcttcagcttgagcctcagcagataatggtacgtgaaccgccatttggtcaccgtcaaagtcagcgttgtaggctgtacatacaagtggatgcagacgaattgcgcgtccttccacaagtgtaggttcaaacgcttgaataccaagtctgtgaagagtcggtgcacggtttagtaagactgggtgctcacgaataactgattctaaaacatcccatacttccggctgcacgcgctcaattttacgcttcgcactcttgatgttgtgagctaaacctttttcaacaagctccttcatcacgaatggtttgaataattcaagagccatttcttttggaagtccacactgatacattttcaaatgtggtcctacgacgataacggaacgtccagaatagtcaacacgtttaccgagcaagttttgacggaaacgtccttgtttccctttcagcatatgagaaagagatttcaatggtctatttcctggtcctgttaccggtcggcctctacgtccattatcaatcaacgcatcgacagcttcttgaagcatacgcttctcgttctgaacgatgatgcttggcgcgccaagatctaataaacgtttcagacgattgttacggttgatgacacgacgataaaggtcgtttaagtcagaagtagcaaaacgtccaccatcaagctggaccattggacgtaattctggcggaataaccggaagtacatcaagaatcatccatgatggtttgtttcctgagttacggaaggcttctagcacttcaaggcgtttaatcgcacgtgtacgacgctgtccttgagcagttttcagctcttctttcagtgtatctacttcttttacaagatcgatatcttgaagaagtttattgattgcttctgcacccatagctgcttggaacgtattaccgtatttatctaaataagcacggaattccttctcagaaagaagttgtttcttctcaagcggtgtgttgcccggatctgtcacaacgtaagaagcgaagtaaatcacttcttctaacgcacgtggtgacatatcaagaacaagacccatacggcttgggatacctttgaaataccaaatgtgggaaactggggcagccagttcgatatgccccattctctcacgacggacttttgcccgtgttacttctacaccacaacggtcacatacaacacccttataacgaacgcgtttatactttccacaatgacattcccagtctttttgcggtccgaagatacgttcacaaaagagaccatctttttcaggtttcagtgtacgatagttaatcgtttcaggctttttcacttcaccaaaagaccaagaacggattttatcaggtgatgcgagaccgatgttcatatactcaaaattgttcacatctagcaaggggcctacctcccttttaatcttcgggttataccctagtcacttgctctaatcgtttctgctattcttttgtgactgcgtcacgttcaagatcgacaggtgcgaggtctgcagcatcttcgtcattagataacgctaatccgtctgctttcttcgtttcctcatcgtcttctaaatctctcatttctatctcttcttcatcgccagataggattttgacatccatacctaaactttgaagttctttaattaacactttgaatgattcagggacacctggttcagggacgttatcccctttgacgatggcctcgtatgttttcacacgacctacaacgtcatccgatttaactgttaagatctcttgaagtgtgtatgctgcaccgtaagcttcaagcgcccatacttccatctctccgaaacgctgaccaccaaactgggctttaccgccaagtggctgctgcgtaacaagtgagtatggtccagttgaacgagcgtgaagtttatcgtcaaccatgtgagccagtttgatcatgtacatgattccgactgatacacggttatcgaatggttcaccagttcgtccgtcataaaggactgttttcgcatcacgggacatacctgcttcttcaagcgtttcccaaacatcttcctcgcgcgcaccatcaaatactggtgacgcaatgtggatgccaaggtaacgtgcagccatacccatatgaagctcaagtacctgaccgatgttcatacgagatggtacccctagagggtttaacatgatatcaatcggtgttccatctggaagatacggcatatcttcttctggaaggattttagagataacccctttattaccatgtcgtccggccattttgtcaccttcagaaattttacgcttctgaacgatgtatacgcggactaactggtttacacctggaggtaattcatctccatcttcacggttaaagactttgacgtcgtggataattccgccgccgccgtgtggaacacgtagagacgtatcacgcacttcacgagccttttcaccgaagattgcatgtaatagacgttcttcagctgttagttctgttacacctttaggcgttactttccctacaagaaggtctccgtcttttacttctgcaccaatacggatgattccgcgctcgtcaaggttgcgtaaagcatcttccccaacgtttggaatatcacgagtgatttcttccggtccaagctttgtatcacgagcttctgattcatattcttcaatatgaatagacgtgtagacgtcatcttttacaaggcgctcactcatgatgatcgcatcctcgtagttataaccgtcccaagtcatgaagccgaccatgacgttacgtcctagagccaattcacctttttccattgaaggaccgtctgcaaggatttctccttttacgacttcatctccaacacttacgattggacgctggttgtagcaagtcccttggttagagcggacaaatttcagcaagctgtatttgtctagattccctttgacttgttgtccatcaacgtcttcatagcgacgaacccaaatatttttcgcttcaacacgttctacaacaccagggtagcggcagataacagcagcaccagagtctttccctgatacatactccatacctgtaccaacaatcggtgattccggctgcatcaaaggcacagcctgacgttgcatgttcgctcccattagagcacggttagagtcatcgttttctaagaatgggatacatgctgtcgctgcagaaacaacctgctttggcgaaacgtccatgtagtcaacgcggtttcgaggaacaactgtgttttcccctctgaaacgagcaatgatattatcatcgataaacgaaccatcttcacctaatatagcattcgcttgtgctacaacgtagttatcctcttcatcagcagttaagtaatcgattctcggtgtcactttacctgtttcagggtcaacccggcggtaaggtgtttcaataaagccgaagcgattcacttttgcaaatgaagatagagagttgatcaaaccgatgtttggaccctctggtgtttcaatcggacacatacggccatagtgagagtagtgaacgtcacgaacttccattcctgcacgctcacgtgtcaaaccacccggtccaagcgccgacagacgacgtttgtgcgtcaattcagcaagcgggtttgtttgatccatgaactgagaaagctgagagctaccaaagaactctttgatagaagcgatcacaggacggatgttgatcaattgctgaggtgtgatcgtgtttgtgtcttggatcgacattctttcacgaacaacacgctccattctgcttaaaccaatacggaattggttttgcagaagctcacctacagaacgcaggcgacggttaccaaggtgatcgatatcatctgtgtcacctacaccatgaagaaggttgaagaagtaactgatcgatgcaatgatgtcagaaggcgtgatgtttttcacagcttcctctacgtatgcattcccgatcacgttgatcacttgctcgccttcttgatcagacggtgcataaatcttaatagattgaagttctacttcatcttctactacgccaccatttggataaagctttctaaatccgatgccgttttctaagtatggaagaactttatcaagaactcttctgtctaaaatttgacctttttctgctagaatttcacctgtttcagggtcaactaacgtttcagccaatttttgattgaacagtctatttttaatatgaagctttttattaatcttgtagcgtccaacattagctaggtcatatctcttcggatcgaagaagcgagagtctagcaggcttttcgcattttcaacagttggcggctctccaggacggaggcgctcgtagatttcgagaagtgctttatccgcattctctgtattgtctttttccagcgtgttgcgtaagtattcattctcgccaatgaggtcaagaatctcttgatcagagctgaagccgagagcacgcaaaagaaccgtaaccggcaacttacgtgtgcgatcgatgcgtacatagactacatccttcgcatcagtttcgtattctaaccatgcgccacggtttggaatgacagtcgcagtaaaaccttttttaccgtttttgtctactttaccactgaaatatacacttggagaacgcactaactgagaaacgattacacgttccgcaccgttaatgataaaagtacctgtgtctgtcatgattgggaaatcacccatgaacacatcttggtcttttacttctccagtttctttgttaattaaacgaacttttactcttagtggagcagagtaagttacatcacgttcttttgattctgctacaggatacttaggatcccctaggctgtaatcaatgaattcaagagaaaggttaccagtaaaatcctcaattggggatatatcttgaaacatctctctaagaccctcatcaagaaaccactgataagaagaggtttgaatttcaatgagatttggtaattctaacacttcgcttatgcgtgcgtagcttctgcgctggcggtgtcgtccatactgaactagttgacctgtcaactgattcacccctcaaatcatgcgtattatatgtgtaaaaagtatttcagcctttcaaatgtcagtaaagaaatacttttacaagacaaaagaaaaaagggtttctaaaataagaaaaccacatccaaaaacaaataccgattttattagttttcccaagtatgcataatttatacaaaatagttgttttttaagcctatcaagcaaaatatacacattggcattttataatgttaacacagctaggaaactgcgtcaaacttttttagctttgataatatagtagcccttttttttcaatacaacctcgacttctccaaagagctgttctaatttttcaatcgcagatggtccgccctgctttttctgaataaccacccacaactcaccttccggcaataaatgatcagcacttttttcaaagatcgcatgtacaactttcttccctgcccgtattgggggattggtcagtatagaggcaaaagcagctgatgaatgaacattcgagaacaaatcactttgatagatgcggacattatcaatgcgattatgtttagcgttttcctttgaaagttcgactgctctttcgttcacatcaatcatatgaatggtgcggctcgtcatttcgtttgctaacgataagccaatcggtccataaccgcaaccgacatctaagacatcgccatccacgtcaggttcttcaaaagcttcaattaaaagccttgaaccaaagtcgacttctttcttagaaaacactccactgtcacttgtaaaagtaaaggtacggtttctcaaggtgaagtcccatgtctgtttattgcttttcactgatggcttttccgtataatagtggtcactcatgatgaatggacctcctctggattcaatcgtttcaggagaatagaaaagaaaaagcccgccagtaaaagcgagctttcccaaaagattaggcgaagattacttaacttctacagaagcgccaacttcttcaagcttagctttaagttcttcagcttcttctttagcaataccttctttaagtggttttggagtgttgtcaacaagttctttagcttctttcaagccaagaccagtgatttcacgaaccactttgataactttgattttttggtctccagcaccagcaagtactagatcaaaatcagttttctcttcagcagcggcaccaccagctgcagctacagctacaggagcagcagcagttacgccaaattcttcttcgattgcttttactaagtcgtttaactcaagtacagttgcttctttaactgaagcaatgatttcttcgatatttaaagccatttgtaattcctccattttaagttttttacgttaagtacgcattaagcgccttgttcttctttttgttctgcaactgctttagtagcaagagcaaggttacgaactggagcttgaagaacgctaagcaacatagaaagtaagccttcgcgagacggaagttccgcaagagccttcacttcttctacagtcgctacgtttccttcgatgacaccagctttgatttctaaagcttcgtggcttttcgcaaattcgttgatgattttcgcaggtgcgataacatcttcgttactgaatgcgatagcgtttggacctgttaagaaatcgtttaaacccgttagttcaacttgttcaactgcacggcgagtcaaagtatttttgtaaactttgaattctacgccagcatcacgaagctgtttacgaagttcagtcacttcagaaactgaaagaccacggtaatctacaattacagtagacatactgtctttaaatttagaagtaatttcatcaacgacaacttttttagtatcgattgcattgctcatggttacacctcctgtacattctttgtgtaacacttataccgatcaggccatcacgttcctaacgaacggttctccatataaaaagcctccattaagacatggaggctgtatatacaagcatacgttaacgtaagactgtgacatatacacctcggcgggttaattaagccataaggcccctgctgtctacggtataaatggacatattctattttacaacattttgatattatcaaaacgattgtgataagtcaagatttattttgcagagaaagaagatggatccactttcacgccagggcccatagtagttgtaacagaaacgtttttcacgtatacacctttagccgctgcaggttttgctttaaggattgtatcatagattgttgcaaagttctcaacaagcttttcgtcctcgaaagaaacctttccgattggcgcgtggatgttaccagctttatcaacgcggtattctactttaccagctttgatttcattgattgctttttctacttcgaatgtaacagttcctgttttagggtttggcataagaccttttggtccaagtacacgaccgatcttaccaacttcacccatcatgtcaggtgttgcaacgattacatcgaattcgaaccagccttgttggattttagtgatgtaatcagaatctccaacgtagtctgctccagcagcttctgcttcttttgctttttcgcctttagcgaacacaagaacgcgttgagttttaccagttccgttaggaagtacaactgcaccgcggatttgttgatcgtttttacgagggtctacgcccaaacgaaaagcaacttctacagtcgcatcaaatttcgctgtatttgctttttttgtaagagaaacagcttcagctacatcatacgctttagtacgttcgatcagcttagcagcttctacatactttttaccttttttagccattataaaaatcctccttatgtggttttagcggaataacctcccacgaataagggttgcgaacttgtcaaaaccaaactcgcaacccaacaagacaataaattaatcttcgatgacaatacccatactgcgtgcagtaccttcaaccatgcgcatagctgattcaacgctagcagcgtttaagtcaggcatttttgtttccgcgatttcgcgtactttatcacgcttaacagttgccactttattacggttaggttcaccagaaccagactcaataccagctgcttttttaagtaaaactgcagcaggtggagttttagtaataaatgtaaatgaacggtcttcaaaaaccgaaatttcaacaggaatgataagaccagcttggtcagctgtacgagcattaaactccttacagaatcccatgatattaacaccggcttgacctagtgcaggtccaactggtggagctgggttagcttttccagcaggaatttgcaatttaacaactttaactacttttttagccacgagacacacctccttaaagtccgtgatgtggtaataggggaatccccctcccactcaacaacttcattctttatatgaatgacgaaataactagctagcgatcttgagcgaactcaagacgtacctttgctatattaccacttctatacactcatttcaagctcttttgaattacaatttatcgatctgcgtgaactcaagttccacgggtgtttctctaccaaacatattaacgaatactttgactttgcttttatcgtaatcaatctcttcgatagagcctgtgaagttagcaaatggtccgtcgattaccttgactgtttcttttaattcaaagtcgatttctgttttgcgttcttcaagacccattctcttcagaatggtttcggcttcgcctggcagcagcgctgtcggctttgagcctgatccagctgatccaacgaatcctgtgacacctggtgtattacgaacaacataccaagagtcgtcagtcatcacgatttccactaggacatagccagggaatactttctttttgacgacttttttcttaccatttttaatatctgtttcttcttcttctggtacgacaacgcggaagattttatcctgcatgcccattgattcaacacgcttttccaaattcgcttttactttgttttcatagccagagtacgtatgcacaacataccaattcttttccatttcgttcaggactattcagtccttccctccccacatttcgtaatgtctatttgacgaatctcgagtaccggtaaatattttcaagcaattgaaaaaacccgtaaaacgggttttttggcaagtcatattatgatctattatagcacgttcagcagaccattattcaagtattaatgaattaattcgattaattgtgagattcctatatcaagaaaagagaaaaagattgcaaagaatacgactgttaaaataaccgtgattgtgtagcgaatcatttcgtttttctttggccagctgacctttttcatttctttcccgacactttttaagaaactgataatacgcatgtaaaagacctccacagattaaagaacgcaaatcttacttcgtttctaaatgtgttttatgtgaattacaagtcttgcaatatttcttaacttctaatctttcagctgctgaagcatcacttttcattgtcgtataattgcggcttccgcagtctttacaggctagagtaatctttttcctcatatttacacctattttctcgacatcatttccttagtaccttatcacagtgtcgaaaaagctgtcaatataggtttgattagagactaatctcgcgaagctctaaatatttctctaattttctctttactctttggagtgcgttatcaattgatttcacatgacggtttaaatcttcagaaatctcttgataggatctgccatcaaggtaaagcacaagtacctttctttccagctcacttagtagttcccccattttcatttcaatatcatcaaattcttctttgctaatgattaaatcttctgggttaagcgctttagcaccggaaatgacgtccaacaatgttctgtctgattcttcatcatatattggcttgtctaatgatacataggaatttaacgggatatgtttttggcgagtagctgttttaattgcggtgataatttggcgggtaatacataattctgcaaaagccttaaatgaagtaagcttgtcctctctgaaatcgcggatagacttataaagtccgatcatcccctcttggacaatgtcctctcgatccgctccaatcaagaaataagatcttgcttttgcacgtacaaaattgcggtatttcgttattaagtaatctagcgcatcactatctccgacatgaaccctttcaatgacttgttcatcttccaactggcaaaattgctctctgatggatttatccttgctgttgtttagattcacttcgatccccccgaccgcacctagatagaaatattatacattaatggttgaaatatcgtcaagctattccagattcccacgccgccatttttcaaacgttttcaatacatcttctgacaattcaatcttggatactggtttatcagaagtaatctttttgactctcgtctctatctttcgttcgatcacttcaatctctctcaaaagctctcgagccgacttccgaagagctccttgtccaaaaattgcccattgttctgtgaagtctgaggtcgccacatgaatttgcgtccgaacattattcaaatcctgggccagcttttcaatccgctcatcagctgtttcattctctctcgtaaagatgacctctactcggtggttgatccgctttttttcgattcctttgaccatatgggcatcgaatacgacaatgactcgataccctgtgtatgcttgatattctgctaaattttgaatcagcacgtctctggcttcttcaaagctgttttcctttaagtgctgcagccgaggccatgcacctatcatgttgtatccatcgactaagaggatgtccatctctattctcctaacggataacgttttcgatacacttcatacatcaatagactagcggcaactgatgcgtttaacgaagtgaccttcccggccataggcaacttaatcagaaaatcacacttttccttgatcaatcggccaatcccttttccttcactgccaatcacaagagcaagcggcatcgtaccatcaaattgtctgtaatcctgtttggcagacgcatctgttcccgcgacccagattcctctttctttcatctcatcaagagctcttgaaagattggtgaccttggcaacaggaatatgttcaattgccccagtagatgctttggcaacggttgtcgttaagccgaccgctctccttttcggaatgacaatcccgtgtgcacctacagcatctgctgtacgcataatggatcctaaattatgaggatcttcaatttcatctaaaataagaaaaaacggctgttcattccgcttttcggcgatttgatacaggtcgtccaattccgcatattcatatgctgctacttgtgcaacgattccctggtgctgacctgttaccatttgatcaagctttttcctcggaacatactgaatggtgatattttgttttttagcgagttcaatgacctgctgggcttgtccttttacagtgttttctgccatccagagcttgtataactcccgatctgacttcagtgtttcaatcactgcatttttcccaatcacataatcatgttgctgactcatttgtcttcctccctgacgttccgatttcaatcgcctgactaatcagctcttctaagcgttcgtcctgcttttcaataaataaataacccatgagcgcttcaagcgccgtactataacgatacgtttgaacgtctgtgtttttaggcactgtgcctgattttgcatttcttcctcttttcagcaccgcttcttctgcttcagtgaaaaagccttgctgctgaagcgtaaataaaatagctgcctgagatttagctgaaacaatcttgcttgctcgtttgtgcagctcatttggttttgtcgcccccgtttggaggaggtgatgcctcacatagacttcaaaaatggcatcacccatataagcaagcgcaagtccgttcaactgtttaccgtctttcagcttttcaaaattcaacatgacctattctcctcttttccagcgagtaccttgaggagtgtcctccaatacaatattcatgctctttaactggtcacgaatttgatcagatagcgcaaagtcacgatttcttctagcctcattgcgtttttcaattaacgcttctacttcttcgtcaagcgtgtgcttttcttctaatgagaagccaagaacagacgtgatttcttggaataagccgataaatgccttgatcacttcctccgaagtatgatcattttccatataataattcgcctgtttcgcaagttcgaataaaacagaaattgcatttgccgtattaaagtcatcattcatttcagaaataaatgtcgcacgctgctcttcaatcttcgccagccattcagtattgtcttctgtgatattcgtgctgctctcaaggcgatgatgtaaattagcatacgacgttttgagtcggttaaacgcactctttgtactctctagtaaatccattgagtagttaattggatgacggtagtgaaccgacaacataaagaagcgtagcacatcaggatcttgttctttcacaatgtcatgcacgagcacaaagttgccaagtgattttgacattttttcattctcaatattaatatatccgttatgcatccaatacttcgcaaaaggtttccctgtcaaagcctcggattgagcgatttcattttcatggtgagggaaggttaaatcctgtccgccagcatgaatgtcgatcgtatcacctaaatattttttaaccatggccgagcattcgatgtgccagcctgggcgtccttcgccccacgggctatcccatgagatttcttgatcctttgcagccttccataaagcaaagtccagtgcatctcgtttcttctcacctacacgaatacgagcacctgtcttcagttcatcaatcgactggtgagaaagctttccgtagccttcaaatgagcgtgtgctgtaatacacgtcgccatccgcttcataggcgtagcctttttcaatcaatgtcgcaataaatgcaatgatatcatccatattttccgtcactcgcgggtgaaggtcagcttttttgcagcctagtgcactgacgtcttcaaagtaggcttggataaagcggtcagcaatcgtcggaacatcttctccgagttcattggctgctttgatgagtttatcatccacatctgtaaagtttgatacaaagttcacatcatagccgctgtattctaaatacttacgtacagtgtcataaacaatagcaggtctggcattcccgatatgaatgtagttataaacggttggtccgcacacatacatcttgacctttcctggttcaagcgggacaaattcttctttcttacgtgtcaatgtattataaatattgattgtcatgattgttcttcctttctgctcaatgaagccagctcaccttttagcttttccatttctcgttccaattctttgaaacgatcggaaattggatctggcaaatcttgatgattgagatcacgattgattttctttccattttgaacgacgactcgcccaggtataccgacaacggtggaatggtctggtacgtcctttaacacgactgaccccgccccaatcttggccccttttccgactgtaatggaaccaagcacctttgcacctgtcgcaatgagggcatcgtctaaaatggtcgggtgccgctttcccttttctttccctgttccccctagtgtcacgccttggaaaacagtgacgttgtctccaatttcacatgtttccccaatcaccactcccatgccgtggtcaatgaagaagcgcctgccaatggttgccgcagggtgaatttccacccctgtgaaaaaccggctgacctgagaaatgatccgcgcaagaaagtacagcttacgcttataaaatgcgtgcgcgatacgatgagcccaaatcgcatgaagccctgaataggttagcactacttcaatatagcttctagcagcaggatcttgatcaaacacagtatcaatatcttctttcagcattttgaaaaacacatgctccccccgttcttccccatcaatctctcttaggacttgctctcttttttggacaaataaaaaacgcctctgccaaatgacagagacgttttgaaaacgcggttccactctgtttagaaagccctcattttgcagccttctcaacttaatcccataacggagggtaccgcccttgcatactaacgtactcgtgttcctcaagggtcttgagggtgcatttccaacgtctgcccataagtctctttcagccggtgaagactctttctgtgatggacgaaaacattgtacttctccctcgcaacgatttccttatatttgtttaatgcggtttaataccgtttctttacctagtagttcaatactttgcggaagttctgggccatgcgtttgtcctgtgacagccacacgaattggcatgaatagtttcttgcctttatgccctgtttctttttgtaccgctttaatagcagccttgatttcatcaggtgtgaaagactcaagccgttcaagctgaccagcaaaagatgccatgacttctggtacttgctcctctgctaaaacttcctttgcctcttgattatactcaatttgctccttaaagaacaactctgttaactcaacaatttctgctccatagcttaattgttcgtgatacagagaaataagcttgcgcacccacgtgttttcttcttctgtcagctgctcgcttaccttgcctgccttttgaagatgcggaagtgttaacgcaacaacctgatcaagatcaagtgccttcacgtattggttatttacccattttagtttatgcatatcgaatagagctggtgacttagaaagtcggtttacatcgaaaatgtcgatgaattgctcttttgtaaacagttcttcttcgcccaccggagaccatccaagtagtgcaatgaagttgaacagggcttctggtaaatagcccaagtttttatattgctcgatgaattgaataatggattcatcacgcttacttaattttttgcggttctcgttcacaatcagcgtcatatgtccgaatagcggaacatcccagccaaatgcgttgaagatcatgatttgtttaggcgtattcgaaatgtgatcctctccgcggagaatgtgagtcattttcatcaaatgatcatccactgctacagcgaagttataagttggcgtgccgtctttcttcacaatgacaaaatcaccgatgccgtctgtctcaaatgaaatatcgcctttgaccatgtcgtcaaatttgatgatttctccttttggcactcggaagcggatacttggctctcttccttcagcgatcagcttgtcctcttcttcttttgataaatggctgcatttaccagaatatcgaggcatttcactgcgggcgatttgtgcttcacgctcttcctctagctcttcagccgtacaatagcacttatacgccaagtctttctctagcagctcatcataatattttttgtaaatctcattacgctctgattgtctgtaaggaccatagccgccatctttatcaatgctctcatcccaatcaataccgagccattgcaggtggcgaagctggctttcttctccgccttctacattacgcttttgatccgtatcttcgattcgaataataaatttgccgccttgactgcgtgcgaacaaatagttgaaaagagccgttctagcattcccaatatgtaaatgaccagttggactcggtgcataacgaacacgcacttcatttcccatgagtttaacttcctttcatctgcatcatgttgtctgacaccaattttttataaacgtattttatcatcaaatcccattctcatcaaaatggatttcactttttctgaagaagcactgttgcctgagaggcaattccttcgcctcttcctgtaaatccaagtttctctgtcgttgttgctttcacattcacctgtgtgacatctgcctcaagcgcttctgcaatcttctcacacattggttgaatgtaaggtgccattttgggcttttgcgccatgatggtgcaatcaatattcacaagtgtgtagcctttttcctttactagtgcccacacatgctgcagtaatttaaaagaatccgcatccttaaactcaggatctgtgtctgggaaatgcctgccgatatctccttcagcaatcgcacctaggcaggcatctgccactgtgtgaagcagtacatcagcgtctgaatgcccaagcagccccttttcatatgggatggtgaccccgccgataatcaaaggtcttccctctgttaattgatgtacatcaaagccttgtcctattctcaacatgatctagtaccctctttccgcatccataattgccttggcaaccaataaatcatccggtgtcgtcagcttaatattggtgtaatctccttggacaatatacacgttttcaccatgtaattgttccacaagactggcgtcgtctgttccaagaaagccggtccgctccgcatattcatgcgcctcttttaaaatagaatgacgaaaagcttgtggggtctggactgcccacaagctctgacgttcaatggtttgttccactttgccttcttgaacgcgcttgattgtgtctttcactggtaccgctacaactgcggagcctttttcaatcgccgctttaacgagcaagtcaatctgtgtatgcttaataaaaggccttgccccatcatgaacaagcacgatgtctgcatctttcacagcctttaatccttcgtatacactttgctgacgttcttcaccgccagtgacaagtgaaacaggcgtttgaaaagcgtgtaccttgagtagcctttcaaagtcttgacgctcctcttcattgatcgctaggatcatgcgtttgcattgcgaatgagcgtcaaacacctttagtgtatgaataatgaccggcattcttttcagctcaataaaaagcttattgcggccggccttcattcgtttcccctgccccgcagccggaataactacttcataatacatgttcgttctccctttagagcgccttctccagaagttttggcttcgcaaaaatcattcttccagcagcagtctgcagcacacttgtgacgagcacatcgatgtcttttccaatgtaattgcgtccttcttcgaccacaatcatcgtaccgtcatctaagtaagcaacaccttggttatgctctttcccatctttaatgacctgtaccttcatttcttccccaggtagcacaaccggtttcaccgcattggctagatcattgatgtttaacactgctactttttgaagttcgcatactttatttaaattaaaatcatttgtcacaacaacacctgaagttaatttagcgagcttcacaagcttgctatcaacctcttgaatgtcttcaaagtcaccttcgtaaatttcaactttgatatctaattctttttgaatacgatttaaaatatcaagacctcttcggcctctatttctctttaatacatcagaagagtctgcaatatgctgtaattcctcgagcacaaattgaggaatgaccatgacaccttctaagaatccagtttgacaaatatctgcgattcttccatcaatgataacacttgtgtctaaaattttcagctttttatcttctatttcaggttcatcatcagctgctccttttttcttggtgacctttgcagatcgggagaacagccccatcatttcatccttcttcttaaaccctacctgaaatccaaggtatcctaaaaagaaagccaggaaaatcggaataatggtaccaaaaatatgatatgggatattgtttagcgggatcacgtttacaataagatatgctagaataagtccaaatactaatccgaaacttccagatataagatcaggaagaggcgcctttaatagagaatcctcgatccatttcacccaattaaccacatagcctgtgcaccatttgccgatgataaagaacacagcggctcctattagtgctgaagagtaagcatttgttatgaaaggtatgtcctttacatttaacagcagaaataactctggaatgataaaaatccctacaactgcaccaaaaatgataaaaaacgcctgaacgattctttttaacataccttcacctcctttatttttcatctgtcaatccaccctcacctgacattgatatatgtttaagtttcctatcataatcaacagaaaacaaaagcatcattaatatacccatattcatccatttttaaccgtgtttaagaaaaatttctctccttatagctggcggtcgatataatgtttttcttgcagtctttttaatcctttttttatctttttcgctcttacttctccaattccttctacttcatccaaatcttgtacatccgcttccataattcgatctaacacaccgaacgcttcaaccacgttttcgacgattggcataggcagtctagggattttgtgaagcaatctgtagcctcttgtgtacacatattcgtcaatatttgtagaagctggatagccaagtaacttgtacagaatggagtcatctaaaagctcaaagctagacatatcttggagctgtttaagcagaacatatggatctttaatcttttctttcacataatctttaataaataaagccgcttcctgctccatatccgtaatcagttcattgacttgcagacggatcaaatgtccttctgttccgagctctttgatatacatattgatttcatttttgattctaagcaccatctcgtaacgatgcagcacggataatacatcaccaaaggtcacaagctcttcaaattctagggcgcttagcgcagaaatggcgtgatctaaaatggttttatatttctcaagtgtttgtatggcttggttggccttcgttaaaataaagccaatatctttcagcgtataacgacgattcccttggtataaggtaatgacgttcctccgttcagaaatcgcaatgattaagcagcctgtctgcttcgctacacgttcagcagtacggtgcctcatgcccgtttccgatgaatggatggttgcatctggcatcagctgtgtattcgcatacaagatcttttgaccagaatcgcttaaaataatggctccatccatcttagccaattcatataagtgtgctggggagaaggcagagttaatatgaaaccctccatctacaacactcttgactttgtcgttataaccaacaacaatgagcccgccagtattggccctcaggacattttcgatcccagcccgaagaggtgtccctggtgccacaaactgtacgatatctaagagatcgagttctctcgctccttttttctctttttccatttctatgatccccctagtgaaattcgaagtgcctccgctacattttctacaccgactaactcaatccctctcggctttttccatccatctatattcgcctgaggaataaacattcgcttaaatcctagtttcgcagcttcctgcacacgctgttcaattcttgatactcttctgacttctcccgtcagaccgacctctcctataaagcaatccgcttgatgcggcgctgcgtctttaaagcttgaagcaatactgacggcaatggccaagtcaatcgccggttcgtcaagcttcacaccgcctgcgacctttaaatacgcatcttggttttgcagcagcagtccgacacgtttttctaaaaccgccatgagcaatgacacacgattatgatcaaggcctgtagccattctccgtggatttccaaagcttgtcggtgaaattaatgcttgtatctcgacaagaacaggtcttgttccttccattgaggcaacaacacacgatccagatacacctgccgaacgttcttctaagaaaatttcggatgggtttaatacttccgtgagtccttcctctctcatttcaaaaatccctagttcattcgtcgagccaaatcggtttttcaccgcacgtaagatacgaaacgtatgatgacgctcgccttcaaaataaagaaccgtgtccaccatatgctctaaaaggcgtggacctgcgatcgagccttctttggtcacgtgaccaacgataaatattggaataccatttgtcttggcaattttcatcagctgtgctgtacattctctcacttgagatacagacccaggagctgacgtaatatcgctttgataaacggtttgaatcgaatccaccacgacaaaagcgggtttcatctcttgtatagcagacgttatatactccatatcggtttcagccaaaacatgtaaagaggtgctttttatgccgaggcggtccgctcttagcttcgtttgtttaatggactcctcaccagatatgtataatacattctgatttttgtctgagagctgtgctgatacttgtaataataatgtggacttcccaatcccaggatctccgccaatgagaacaagagagcctttgacaattccacttcctaatactcggttaaattcttctaaattcgttttgattcggggttcatctgatgtttcaattgcagatataggtgaaggtttttgaatggtttgaacagaatgattaaaagcgcttcgacggtttgccggctctttgcgaacgacctcttctgtcatactgttccacgtgccgcagcctggacatttccccatccatttggctgactcataaccgcacgattggcatataaattttgattttgtcttagccatagattgaagaatacaactccttatactgatcagaaaataagtaaagggaggcatacactttactggtatgcctcacacttttttcttactatattagttcgtagcagccgtcgtttttacgacaatttctccatcttccacatctaatacgatatgttgacctttttcaatattacccttcagaagctcctcagaaagtcgatcctccacatgcttttgaatcgctcttcttaacgggcgcgcaccgtactcaagatctacaccttcgtcggcaatcttcgcttttgctgcttccgtcaattcgattgaaaggtcttgttcttttaatcgtttcgtcaattgatcagacatgagagacacgatctcttttagatgtttcttttcaagtgaatggaagacaatgatttcatcaatacggttgatgaattctggtctaaatgcacgcttcaactcgcccatcactttgcctttcatatccttgtaattttgtccttcatcctgcacattaaagccaacatatttatttcgcttcaattcactagctccaacgttggatgtcatgatcaaaatcgtatttctaaagtcaacggtacgccctttagaatcagtcagacggccatcttctaacacttgtagcaaaatgttgaatacatctggatgtgccttttcaatctcgtctaaaagcacaacagaataaggttttcttctcactttttcagtcagttgaccgccttcttcatagccaacatagcctggaggtgacccaacaagtctagatgtagagtgtttttccatgtattcagacatatcaatacggatcatcgcttcttcatcaccgaaaatagactctgcgagtgctcttgcaagctccgttttaccaacccctgttgggcctaagaagataaaggagccgattggacgttttggatcttttaggccagcacgcgcacgtctcacagcttttgctacagcgacaaccgcttcatcctgcccgatcacacgagaatggagcaattgttccatattgagaagcttatctgtttctgtttgtgcaatttttgaaacaggcactcccgtccagctagagacaaccattgcgatatcatccactgatacctctgaattctcctgtccttgcttttctttccaagatttctttgtgacttctactttttcacgcaaacgctgttccgtatcgcgaagagaagctgctttttcaaattcctgactttgaacagcagcatccttttccttgcgtacttcatcgagcttttgctctagttcttttaggttaggcggtgttgtgaaagaacgtaagcggactttcgaacctgcctcatcaattaaatcaatcgccttatctggaaggaaacgatcagaaatataacggtcagacagcttcaccgccgcctcaatcgcttcatccgtaatggacacacggtgatgtgcctcataacgatctctaagtcctcttaagatttgaatactttcatcaacagatggctgatccacttgaattggctggaaacgtcgttcaagcgcagcatccttttcaatatatttacggtactcatctaacgttgtcgccccgatacattgaagctctccacgtgctaaggatggtttgagaatattagatgcgtcaatcgcaccctctgctccaccagcaccaatgagtgtatgaagctcatcaatgaagagaatgatatttcctgcctgacgaatttcgtccatgacttttttcaaacgatcctcaaattcaccacgatatttcgttcccgctacaacggttcccatatcaagtgtcatcactcgtttatcgcgcaggatttcaggcacttcattatgaataatttgctgcgcaagaccttcagcgatggctgttttaccaacaccaggctcaccaatcagcacagggttattttttgttcttctgcttaggacctcaatgacacgctgaatttctttgcttcgtccaatgacagggtccaaactgtcttctttcgcaatagctgttaaatcccttgccaagctatctaatgttggtgtatttgcattgctgttagagccagcggcagatgcacctgtttcattgctgccaagcagctgcagaacttgctgacgtgctttatttaagctcactccgaggttatttaaaacgcgggcagctacaccctctccctcgcgaataagacctaatagaatatgttctgtccctacataggaatgacctagctttcttgcttcatccattgaaagctcagtgaccttcttcgctctaggcgtataatgaggaatagcttgagacacctcttgccctcttccaatcaagctttcgacttctttttggattttatctgaaacaaggcccagtgcttctaacgcttttgcggcgatgccctcaccctcacgtactagaccaagtaaaatgtgctcagtaccaatgttcttatggcctaggcgaatggcttcttcttgtgcaagtgctaataccttttgagctctttcagtgaatcttccaaacatcatatcgtttcatcctcctgtccattcctatgcatttctaaacgcagcctttctctaataatcgctgctcgttttatatctcgttcatttggctccaaagctcctcctgagtactgttgaagaaagcctggctgagtcaaaatcatgagttcattcagtatattacttgaaagccccttaatgatacctaaatcaattccaaggcgcacatctgacaaacactttgctgtttcctttgattcaatcatacgacaattggacaatatccctaaggaacggtacactctgtcctcaagttcaatttgagatgtttgatataacgcctttcgtgcagatcgctcttgttcaatgagctgagcggtcacactatttaagtcgtctacaatatcttcttctgattgaccaagtgtcatttgatttgaaatttgaaagatgttccctattgcttcgctaccttcaccataaattcctctgactacaagacctaattgattaatggccggaataattcgattcatttgtcttgtgagggctaaagctggtaaatgcatcatgaccgatgccctaatacctgtacctacattagttggacagcttgttaagtatccccgcttttcagaaaacgcataatccacttgctcttcaatccagtcatctatctgattagccgcttttaatgcattggctagttggaaacctgggaataagcattggattcgaatatggtcttcttcattcagcatcacactgatttcctcattttcagaaagcaaacaaccgccaaatcttgattctgctaagtttgggctgatcaaatgcttttcaacaagtactctctttgctaaaggctgcgtttcattcatacgaatcagaacaaagtttccgatgtccttcacttcctggctagcaaacttttgctcgaattgctggaggacagcttcagcctcttcttgagaaaactgagttgggaaacgaacatgctctaggttgcgtgctagccggattcgactgcttagaacaatgtcactttctggtcctttttgtttcatccattgacttaaagcgtcttgaataaaatgctggagcgacatgttgttaatctccctccctctgctgagattgttcatgctctaatgcacgaatttgatctcgaacttccgctgccttttcgaactcttcttgttcaattaactgtttcagctcttgctgcatcatctcaagtttccggcggacatgaagactgccggcaatccgtttaggcacttttccattatggactgtatttccactatggactttccgtaaaacagggttcagatactgatcaaatgaacgatagcattctgcacagccaaaacggcctgtttttctgaattgttgaaaggttaagccacacttaggacattgatccacttctctcgcttcttgaaaaatagaagatcccttattagcacttgtggtaaagctaggatcaatattcaataaacctgataataagttgtgaatcgagaaaccttggtttccactcatagcatatgaatcactgttttcttttgcacattgttcacatatgtgcatttcttgtttttctccatttataactttcgtaaagtgaaaagtggctggtctctcattgcattcttgacaaatcaatcttttcacccgctttactttaatttcaaagcatttaacatcgctttcatcatccgagcccgcaattcatctcgttcaggtaaatcaatgtgcaaaacagaacggtccatgacactgatcatcatcttagcttctctttcagataaaatgttattttctacaagacgcatgatgatatgatcagaggcagcctgtgataaacgatgatatatttgggaaataatgttgttcaataagtcgacttcatcattcattttgactttaatgatgcggatatagccaccgccgccacgcttactttcaacgatatagcctctctcgctcgtaaagcgtgtattgataacatagttaatttgtgaaggtacgcattgaaacttatctgcaatttcattgcgcttaatttctaatatttctcgaccattctgatccaagacttccttcaaatactgctcgatgatatcagaaatattttgtgccactccgcctcctcctccattgactttgactatatttgactttaaccttactataaattttttcgatcgatttttcaagataatcgctcaactaagaatattatttccacatttatatggtgtcaaacctctcaaaaactataaaaactcgaattaacaggtacgttttgtcttgtttagttttcaaagatcattttcgttatcgctcgtaagcgactttaatatcttaacatttcgcatcggttaaagtcaagaacttttttcaatttcttttttaacctcgttgctgttttgcggcaacgaataataatataccatcttgattctttccttgcaatagtttttttaaaaaaaatttcattttatgaaaaataaaaagcaccatagttaaaatggcgctttgagtgatgtattaacggtttctcatttgtgggaaaagcagtacatctctgattgatggagaatttgttaatagcatgattaaccggtcgataccgattcctagtccgcctgttggaggcataccatattctaatgcttcaacaaaatcgtcatccattagatgcgcttcgtcattcccttcttcacgttcttttaattgagcttcgaatcgttctctttgatcgattggatcgtttagctctgtgaatgcattagcatgctcgcggcgtacgataaatagttcaaagcgatcagtgaagcgagggtcttcaggatttttcttagctaatggagaaatctccactgggtgtccgtaaataaatgtaggctgaaccaatgtttcttctactttttgctcgaagaactcattgatgatatgacctactgtcatgtttttcgtgatttcaattccgtgatcagcggcatactgcttcgcttcttcaacagacatctcctgccagaagtctacaccagttgcttctttgaccgcttcaaccatatggagtctcttccattcaggcttgagatcaatttcatcttctccatattgaatagtggttgttcctagtacctcttcggcaatatgagcaatcaggttttcagttaggttcatgatgtctttgtaatctgcgtaagcttcgtacagctcgatcatagtgaattctgggttatgacgagttgatacaccttcgttacggaatacacggccaatctcgtatactttctctaggccaccgacaatcaagcgttttaagtgcagttcaatcgcaatacgcatataaagcggcatatccagtgcattgtgatgagtaatgaaaggacgtgctgatgcaccaccagggatgctgtgcattgttggtgtttcaacttctaggtaccctttagaatctaagtatcttctcatggattgaataatcttgcttcgcatgatgaacgtctgcttactttctggatttacaatcaggtcaaggtagcgctgacgataacgttgttcaacatctttgagtccatgatatttatcaggaagcgggcgaagtgcttttgtgagaacctcaaagctagtcgctttaattgaaagttctccaacgttcgttttaaataccattcctgttacaccgatgatatcgcctaggtctgagcttttgaataactcgtaagcttcttctcctacactatctttacgaacgtatatttgaatttgtccttctaagtcttgtatatgcgcaaagccagctttcccttttcctcgctttgtcatcatacgtccagcgattgtcacttgggtagacttttcttctaagtcttctttagaaaactcatcatattcagcgataatttgtgcggattgatgagagcggtcatatcgttcgccgaatggatcgataccctcttctctcattttattcattttgtcacgtctgacctggaattggtcatttaattcttcgttattaagcccttcattactcatttatatcactccaataatgtattttgcagagaaaagcagaaaaactgccagtacatgcactagcagtgagctacaaaaagaaagatagtcttatcctacttttatactttgaagctcttttgcctcggcttcgatcgtaaagtcatcaagaacttgtactagctccgctctcgtttcactttgattgatttgatttcttacgtccgcattgcctcggacaccttttaagtaccatgctgcgtgctttctcatttctctgacagccacgtgttcgccttttaggtcaatgagtctgtctaagtgaagtttgcacactgacatcttctcacgtacatttggctcttcttttagttcacccgtttctaaataatgaaccgttcgatagatcatccacgggtttcctagtgcggctcttccgatcatgacagcatctacacctgtttcatcaagcatacgttttgcatcttgaggggttttgacatctccattgccgatgacagggatggaaacagattgtttgacctcttttataatatcccaattcgctgttccttcgtacatctgcacacgtgtacgtccgtgaagcgcaaccgcttgtccacctgctcgttcaacagcacgggcattgtcgatagcgaagatatgatcttcgtcccagcccattctcattttcaccgtaacaggtttatctacagcatctacaacagcagagaccatttcataaatcttgtttggatcaagcagccatttcgctcctgcatcacatttcgtaatcttcggtacaggacagcccatgttgatatcaataatgtctgctgttgtgttctggtctacaaactttgccgcttcgacgagtgtgtctttttcacctccaaatatctgaaggctcaaaggcttttcacgttcatcaatgtatagcatacccattgttcttgcattgttgatcaggatcgctttgtcactgaccatttcagcgcagactaaacccgctccaaactctttaactgtcagtctgaaggcagagttgcacacaccagccataggcgcgagcaccactttgttattaatgtcgatatctccgattttaaacatcatttcccctccttccttcttcaagaattggcgaaagttcttccaccgttatatttaaagcatctgctatttgaccaaccaattggtttgttggtaatcgattgcctcgctcaatttctcctaagacagagacagagatgcctagtcttttcgcgaacccttcctgagtatacccttttagctttcggtatgcacgaattcttctaccccacatgtctttttccatatgcttacaccttcttggtctgttacggcatttatttgtacttcgccgattcctgggcaaatctcactcatcggaacaagaacgaataaacgttcgtacattctaggatgtggtactacaagctgttctgtttcaatattttcacgattataaagtaaaatgtcaaggtcagccgttcgcggtccccatctcacttctcttgttctgcctaactcttgctcgattttctgagtaagcaccagtagttcatttggacgaagcgaagtggaaattttcacagccatatttaaaaagtcatcttggttttcgtaacctacaggtgttgtttcatatatagaggagatcaattctacttgaacctctggatgttcgtgcagttttttgacagcttcttttaaataggtttcctttttacctatgttcgaacctaaagcgatgtatgcggtattgttcatgtgcgtgatctcgtcatttcaattgcaacggactgatagtgtcctggaattggcggatctggtttgattacctttactgtacattcctgaactgtcggaaagtcctttaacacttggttcgcaattctttctgtcagtgtttcaacgaggttgactgattcaccttctacaatgcttttgcagatttggtagagctctgcataattaatggtctcattgaggtcatcagtttgtccggctttacttaaatcaagtgaagctgttaaatccacacggaaccgctgtcctaatttattttcttctgcaaatacgccatgatagccgtaaaattccattccatttacatatactttatcgatgataagcgcctcccttattcaacatggcatccatcatttttgccattcttgcgatttcttttacatcatgtacacgaaccatcgcactgcctttttgaatcccaaggcagaccgtggctcccgttccttcagtacgttcttccggcggcaggtctaagacagctccgatgaatcgctttcgagatgtagctaagagcagtggatacccaaggtgacaaaaatgttcgagctcattcatgaccatgagattgtcctctttatttttcgcaaatcctacacctgggtctaatatgatcatgtcatcacggacacccgcttgttttgcaatttgaacactttctttcaaatctgcgatcatatctgaaatcagatgtgtgtagtttcgctctggccgattgtgcattaaaataatcggcacattgtgcttcgctgccacatgcgccatttgaggatctgccttcgctccccatacatcattaatgatggaagctccagctttcaccgcttcatctgcaacatgggctttatacgtatcaatggaaatcggtacatccaattgttttgtgatcttttcaatgacgggaatgactcttgaaagctcctcttgttctgagacaaatgccgctcctgggcgagtcgattctccgcctatatcaatgatatgtgccccgtcctctatcagctgggctgcatgagccagcgctttatccacttgattaaactttcctccatctgaaaaagagtcaggtgtgacatttaaaatgcccatgaccaatgtcttttcttcataactaagggtgtggtgcttggcttgtatgattttaggctgttttatcacttgttgtgtcattgtgtccacctactctttataatctagacgttcttttgtatattgtgttctcaattttgttgagaagatccggctgttttgaggaaaggagatttcccctatacttctgaaaggcacaatcccttgaacagaattggtcatccatgcctcatcagctgatagcaaatgggagactgtatatcgccctacttttagtgaagcctccatcgcttggagtgtttcgatacaatatcgacgagtgactccatttaaaatgcctgtatcaagtgacggtgtataaatcacatcgccttttcgccaaaatacattggaagtaattccttctgccacatcattttcttttgttaaaaagataccttctaatttcggatcatttcccacttctcttttagccagcaggttgttcatataatggtgagacttaaggcgcctcggaccttccggggtatttctcctcgtttgaagaatgactccctgtttctcatctaaaacagattcgggccggaatggagagatcatgacaaacacgacaggctcttcataaggatctgcagaaaatccattgcccctgcccgcagaaacattgaagcgaattctcgcgtgtccaccggctatttcgtttttatttagtaaggtatgaataatgtcgagtacaaatggtttctctattgtggattcgatgcaaaggtcacgcaatgattgattgagcctttcaaggtgccaatctaacagaaagacttgtcctgccaggctggtaaatgtttcgaatacaccgatgccatatagaaaaccatgatcaaaaggagaaagagtcgcgtctttctcctctatatactgaccgttcagataaatgatcatgcgtttacttcatgcccctttttacgataggtttcaatgaaatttttaagcatttcttttccgaaggacgtcataatcgattcaggatgaaactgtacactttcaatcggcagctctttatggcgaatggccatgagctcaccttcctttgtgctggctgttgcgtcaaaacactccggcagcgtctcgtttttgacaattaatgaatgatatctcgttgcgacaagcggattttggagtccagtgaagacaccttttccgtcatgagcaatctctgacgttttaccatgcattaagcgttctgcacgaatgacatccccgccaaaaacttgcgcgatggattgatgacctagacacacaccgaagatcggaatacttcccgcaaagtgcttgatcgcctccatactaattcccgcttcatctggactgcatggccccggggaaatcatgagaaaatccggcttgagttcttcgatttcttgaatggttacttgatcattccgtttcacgatcaattcttctccaagctcacctaaatactggaccaagttgtacgtaaatgaatcataattatcaatcattaatatcatgctctgctcacctctaactcaaaatagtctcttctttgctcaactgtaatgcttttttcactgcataggcttttttaatcgattctttgtattcgtgctttggtacagaatcgatgacgatcccagcacccgactgcataaaggctttgccttcagtacagtacgccgtacgaatgacgatgttaaagtgcatatcttgattgaatccaaaccagcctatagatccagtataaagcccacgccttgtcggctcaagctcttctatgatttccattgttctcacctttggagcacctgtaattgttccgcctgggaatacagctctcatgacatctactgcatcacaatcatcacgcagttccccttgtacgttggatacaatgtgcatcacgtgtgaatatttctcaatcgccataaattcgttcacttttactgagccataagtagacacgcgtccaaggtcattccgctcaagatccacgagcatcacatgctctgcgcgttctttttcattttcaatgagctcttttgccagcgcttgatcctcagcgtcgtctttgcctcttgatcttgtacccgcaatcggtcttgtttctaattgattcccctttttcttaataagcagctctggagatccacaaacaatctggaaatcaggcgtgtgcagataagacatatacggagatggattgacttgacgtaacgttttgtataaatcatacggatgtgtgtggagctgttcatcttgtctgatggataaattcacttggaacacatcaccgcttgcgatatattgtttaattttctctactgcttctccaaaggtttcttcggtaaacggtgctgctggtacaaattctgcagaagattcatgaacaggagattgcgctgattcttctgaagagcttgtccactttcgcttcaaatcttcgagtctttgatgagtgtcactcacaggttccgttccttctgtgtgagtgatcagccacagcacgttttcttcatgatcaaagaccgcaacatcattaaatacgagaaaataaagatcaggtgttttcaggtcatcaatggacagcattttaaaatgctcgatatatcttgcataatcatagcttaaaaatccaatcgccccgccttgaaaatcaggatattcctcattcatttcggtttgaagggtttggaaccaatccgtaaacgctctgaatggatcgccttctttgaacagcacctcatcttgataatggatggttgtcatcccgtctttccccttcgctttagcaaccgggtcaatgccagcaatgctgtatgaaccgccgcgagcactttcaagaagaacatggtgtgtttcgccagcagttaattgttcgtatcttttcaggaaagcatctttcgtaaaaggaatttggatgcccatcggcctgcgttgtgtcatgttatcatcctttttcattttcattaatcttattgtaatgcaatccaatttatttagaaaatagtatttgctttccatctacagatttcataaaaaaaccccagcaaatgctggggtaattggtttaatcgaattgataaagaggtgtactgagataacgctccccattacttgggatgatagccagaacctttttccctttaccaagcttcttcgctgtttgaagtgctgcgtaaatagctgctccagaagaaataccgccaaggatcccttcctctttcgctgcttttcttgcaagctcaaatgcatcttcgtttttcacttggataataccgtcatatacttccgtgttcaagattgaagggataaaacctgctcctatcccttggattttatgcggacctggctttccgcctgataatacaggagaatctgtcggctctaccgcataaagctgaatcgatgggatggcttcttttaggacttcaccagcacccgtaatcgtgccgcccgtaccaacacctgcaataaatgcatcaagctcgccgtcaaactgttcaagaatttcttttcctgtagtacgacggtgaatctccgcattggcttcgttgctaaattgctgaggcatgaagtaaccatgctcttctgccaattcttctgcctttttaatggcacctttcattccttctgcacctggtgttaatacaagctctgcaccataagcgcgtaaaaggttgcggcgctcctgactcattgtgtctggcatcactagaattgcgttaattcctttagctgccgctaccatcgcaagaccgatccctgtgtttccgcttgttggttcgatgagcgtgtcgccggcttttaaagtacctttcgcttcagcatcttcgatcatcgctaacgcaatacgatcttttacactgctgcccgggttcatatattcaagtttcaagtagacatccgcactgtcttcatctactaaacggtttaatttaacgactggtgtatttcctattagttcaaaaactgaatttgcaatacgagccatcactaacacctctatctccgagtaattttattgtattaatattaaattatcaatttcaaaaaattttgtcaatgcttttagtcctgctcgccatcgtaaaaccatgtgacttttgcttctttccacagggttttgacattcgccttttcacctaggtcttccatggcaatctgccttttgatctgatctttgacttcttcataagagaaggagcggccatctaatttttcttttagttgaataatggcatacccgttcttggtctcgatcggttcttttgtccattcgtctggctgaagcttttgagcttcctgtatgtatagggctggtatactttcttgttcttctgtcacaaacccaagatctccgccatatggagaggtgtagcggtcaatggagcgttcagctgccaccgcttcgaagctagatccgcctttcagatccttcaatacattttcagcttcgccttttgtcttcacgacgatatgacgaatacggtatgaatcatcatattgatataagtccttgtttttttcataaaaggatttcgcttctttttcagaaacgacagcatctctcgttaaaagctgctctaataaaatttgataacgaatctgttctttccattccttttcactcgtatgtccatcttcgtagaaattattagataccgctttaagcatgagcaattcacgattgatctcttttgaagacacctcaagcttgttttctttcgcaagctgattgaccaccttctgattaatcatttgctcaagtgttgccttgccatagcggtcttccatcttctttaaccattcttgacgcgtcaccttctcttttccaatcgacgcaatttcttcaccgctcttcccatttgaagaagcctgtgacatttgcgactttgttaatacatatgcaatgacaacggcattgatcataagcaacacgaggataaatgtccataccactcttgcttttagtctcatttttcgtctcctttccattctaaaaagaaaacccgctgcttagagcttagcgggttatttcttcacgtagctcttctagctcttcttttgtaaatacatacgtttcgttacaaaaatggcattgagcttctgcttgtccgtcttgttcaatcatgtcgtcaatttcggctttccctaggctgataatgccattagcaaaacgttcttttgagcagttacaagagaattcgacaggtacagtttctaaaatttgaggtttttctccgagtacttcttctaaaatttcttctggtgtcatccctttttcaatgagtttagaaataggttcaatggttgagagccgcttttctagtctttcgatgacagcatcttctgttccaggcagcaattgaatgatgaaaccgcctgctgcaaggatcgagttatctggattgaccagaacccctacgcctacagaggaaggcacttgctcagaagagacaagataataagtgaagtcatctccaatttcacctgagacgatctccgtttgtcctgtaaagtgatctttcagtccgatatctttgacaacactcaacgttccagatgtcccaactgcacgtctgacatccagcttgccatgttcatttaagtcaaagtggacttgtgggtttgagacatatccgcgcacctgaccttttgcgtttccatcagcaatgatggcaccgattggtccaccgccttcaattttgaccgttagcttattttcgcctttcagcatagcacccatcatgactgtagctgtcattgttctgccaatcgctgctgatgctgttggccatgtatggtgccttctttgtgcttcgttgattgtatctgttgtgtttgcagcatatgctcggacttttccgtcatatgctaacgctttaactaagtgatccattcgattttaaacctcctatagtacaccgacacgattacgttcataaataagttgaagtccttttaatgttaagaacggatcgacaatatcaatgcagtctgattcatttccaatcaatgttgacaaaccgcctgttgcaatgactttcggtgtttgtttcgcttgctgcttcatccgtttcactattccctcgacttgcccaacatatccataaaggatgccggattgcatcgcactaatggtgttttttccaacaatgtgatctggacggacaatttcaattctcggcagcttcgccgctcttgtatataaagcctctgttgagatggtaataccaggtgcaattgccccacccatgtattgtttttgttcattgatatagcagtaggttgtcgctgtgccaaagtctaccacaatgagaggtgccccatataggtgaatcgccgctactgcattcacaattcgatcagccccgacttcctttggattgtcacacataatgtttaatccagtcttcattccaggccctacaatttggggtgttaagtgaaagtacttctcgcacattctttctagtgcaaacatcattggcgggacaacagacgagatgataattccttctatttgatcaaacatcagccccacataatcaaataaagacctgatggccataccaaattcgtcttctgttttatgacggcttgtttcaattcgccaatggtagtttagatcgccgttatgataaacacctaaaacggtatttgtgtttcctacatctatcacgagtaacaacttcatcaccactttgaatagtttctcaaaaagagcatttttcgactttctatcataccatacacgaattgagttccatttgtaaacaattcgaaaccgatccatttaggaatcgaaataaaaaaagctgccggtgatcccggcagctttcacagaaggagattagatctcctcatcttcttttttcttgatgttcactttcacatcatcgtttttctcttcgtcatctgcgtatacacgctctggaagctttccagtttcgtaaagagatttaatttgctcagcatctaatgtttcaacttctaaaagggcctgtgcgatgatttctagcttatctttgttctcagtgagaatttgtttcgcacgttcgtagctgtccttgatgaaacgctgaatttcttggtcaatctcgtaagcaatggcttcactataattcggctcgttgttaaaatcacggcctaggaacacttgaccaccttgtgcttgaccgaactgaagtggaccaagcttatcagacataccgaactcagtaaccatttttcttgcaatgcctgttgcacgctggaagtcgttgtgagcgcctgtgcttacttcaccaaacgtaatttcctctgcaacacgaccgccgagcaagccgacaattttatcaagaagctctggcttcgtttggaaataacggtcttctcttggaagcatgaccgcatatccgcctgcctgaccacgaggaacgatcgttactttatgcaccatgtccgcttcgtctaggataagtccaatcacagtatgacctgcttcatggtaagccacgatattacgttctttcttcgaaatgacgcggcttttcttcgccggtccagcgatgacacggtcagtcgcttcgtcgatatcacgcatatcgattttctttttgttatgacgggcagcaacaagtgctgcttcgtttagtaagttctcaagatctgctccagagaacccaggtgttctgcttgcaatggctttcaagttcactgtatcatcaagcggtttgtttttcgcatgaaccttcagtacttcttcacggccaatgacatctggtcggtcaaccgtaatttgacggtcaaaacgtcccggacgcagcaatgcaggatctaggatatctgcacggttcgtcgcagcaatgataataataccttcgttcgcactaaaaccatccatttcaacaagaagctggttaagcgtttgttcacgctcgtcatgaccaccgccaagaccggctccacgctgacgacccactgcatcaatctcatcaataaagattaagcaaggtgcattctttttcgcattttcgaataaatcacgtacacgtgatgcaccgacaccgacgaacatctcgacgaagtcagaaccactgatgctgaagaaaggaacgcctgcttctcctgcagatgctctcgcaagcaatgttttacctgtacctggaggtcctactagtaaaacccctttaggtattcttgcgccaagctccgcaaatttacgtgggtcctttaggaattcaaccacttctacaagctcttgcttttcttcatctgcaccggcaacatctttaaatttcacacgtttcttctcttctgtgtaaagcttcgccttactcttaccaaagttcataacacggcttccaccgccctgagcttggttcaataagaagaagaacaggataaagatgatgataaacggaatgatggtggtcagaacttgcagccatccatttgtttcaggtgctggttctacttttacatctgtattcttcagtgcactgtaaatctggtcaacaccttgaccatctggaacatgggtaatgaagtattgatctttcttcgcgccatctaattgaccacgaatttcataaacccctcttacaggctgaatggagatactctccacttttcccgcacttagattttgcgaaaatttgctgtaagacatgttctcaggcttttgattaggggatcctaaccaactgactacccctatcacaagtaataaaataagtatataaaaaatcgtattacgaaaaacccgattcattccttacctcctcccacagtaagcacaactatgttcaatagtatcatagaaaatcattccaatacaaccaataacctcatgtatacgtatgctgattagccttcgtaaacagatggttttaacactccaatatacgggaggtttcggtaacgttcagcgaaatccaatccatagccgacaacaaatgcatctggcacttcaaatccaacataatctgctttgatgtctgctttacgaccgcttggtttatcaagcaatgtcacaatttttatggaatttgctttacggtatcggaaaagctctaccagatagctcaaagttaacccactgtcgatgatatcttccataattaaaatatctcttccttcaacagaagtatcaagatccttaatgatctttacttctcctgaagatacggtagattttccgtagctagatacatccataaaatcaagttctaaatatgtatcaatgtgtttgatcaggtctgccatgaatggaagagcccctttcaaaacaccaatagccaggggaaatttaccatcataatcgctggttaatgttgcacccagttccttcactttttgctggatctcttcttctgagatcaaaaccttttcaatatcttgtttcatgcttttgcttgccccctacaaattttcatgctgtctatattgtaatacaatgagatcgctgtttgtcatatcaatttcttcaaaaacggattttttcagacctgggatccagatgatttgatgatccgagtcagtgacgatcggccagctgtctctttctgcaagaggcacttttttatcaataaatatatccttcaccttttttgatccattcatccctttaagtttgattcgatcaccattttttcgtgagcgaatgatcaaagggagacgaacatgatctttttgaagcaagaaaaaatggtttccgttccgtgcatccttcggaacatgatttgataccacgatagactgcccattcggaaggaaaagctcctctccaagctcaccctttaagtgaagagcataagactggtctagtacaagcgatcgttcaaaggtaaacatacagtaatcataagacttgacagcttgtaaaccttttggcaaatctaatgatccagacggttgttcggtatgagataaccagtccaaagtccctagaatatgctggtttgaaaacgctgattgagtgttttcataaagatagtttaatattagttgaatgcctcttctttgtaaaggcaaaggcaggtcaagcaaaggcttcgttttgatcttaatttgcttaggcgattgattcgttatcacttggttcatttgttcctttgttaatgcctgcaaatattgctcatcctcagtcagcatgtcacttacaaactgaaagctttcatgtacatgaggtgcctcttcttttaacacgggaagaatgtgtcttcttatccggtttctcaagtagtcatcagtgtgattgctttgatcaatgacatagggaatatgttctttttcacaagctgtcagcacgtcgtccttggaatatccaatgagcggccgaatcagccatccatcttgaaaaggacgttttgcttggataccggcgagtcctattccaacagtccctctcgcaagcctcatcatcattgtttctacttggtcgtctccatgatgtgcaagcgctataaattgagcgttgtattgctccatcaattgacgaaagaaagcatatctgcactcccttgcagctgcctgtttgtttaagtggttttcttttgcatattgggtgacctgtatgcgggccgattcaaaaggaatctcttgctccttgcagtaagcctcaacaaatgccaaatcagcaaaggattcttctcctctgaacatgtgatctacatgggctgcaatcagctgataggaaccttttcgacgtttgtttagttcgtgcagtaaaagcatggaatctggtccgccagaaaccccgacaatgactgtcgtattttcaaggtaaacatcatgttttttcaaaaatgattcaattctattcacaacttcctcctcacaaagagcaggtaatttaaagatatacatatcctatcactttcagtagctccaagcaaagatgaagcctgcttttttacaggtctatagcaggaacaaaactacatatgcacagtaaagagcaagtacactgcacacgatcagaacagtttcaaaaagcccgcctgattttttgcgtactggtgttctttttgctgctgcaactctcgatcgtgaagtcacctgttgattttgttgaacagcgggcttttgcccgtttttttgctgctgcttcttttgactcgcttttcttgaagcgatcagctgtccttctttcagcatcgcactcttcatagccgccgctgattgatatttaccttgtagagcagcctttaacaccctttcataacgctttaataaaggatgtccttcaatcgctctgtaaagctgcttttccggttctgctccttttttgaattctttcttatacgcacaattcaccatcaccatacttaaggcaaacagatcataggatggctctgcctttcttgtgccgaatccccaatagcctcgatcaaaaaactctgtatactccttgattgccctgcctacttttgtcgttccccctacatcaatgcaccggatcgcggctgggggacctgacacgatgagattgtctggcttcaagtcaccaaaaatccagccttcctgatgtaaatgagccaggttagataaaagctgaaccattaaaacgacgatccactcatcacctttttgttttacaaattcaagcagtaacgggcctctgacatactccatcacataaaaggaacgcttttgaagcataccgggataaatcgcatcatccatatcataaaaagaaggccccatggttttcacaggagccttagaaaaggattttaatacattgacttcagatgcaatgagcatactgtcatcactcactttaagggctacttgaccatttggcgattcggctagatagacaataccgttcgccccttttcccagctcttttacaatgcggtaatgatggtgatgccatttcccttgaatcaccgtgcctaacggaatgttagaagccgaattcattatcatgctcttcctttgcttcaagcagccctttacgcgaacgaactgatttgaaatgctggagtgcttctcgaagcgctggtccagttggagtaattcctcccgtggtcagtttcgggaaaatagatgataacgaatcgaatcgaggcgtccaattcaacacaatttcagcatctgagtttttcccgggaaatatacacatcccaaactgattttcaccaattcttgaatttaaactaatagagagatcgatgagtgcttctttaacggtcggcagcttcggtttcatacttgcacttgtatcaacaagcacaagtacttgaagatgaaccgtctctcctaactcatcgactacttccatcacttccccacgcttatcaggcggaagctcttcaatttcagtgtctttgccaagtatttgctgcaattctttattcacaacaccttgtaaggtttgtgtcatcgctttttttgtgaccatttgtaccgtttgagataactgctggacgtagacaacctgatggatgcctccgcctgcgagggcaatcccctcgacttctttcatcgcttcatgatcgtgtctgttttcctccataatgccaatgacattgactgtaatcccttgttcctttgccaatgaggcaatcgcaagtggatcttccccgtgatttgagcagccatctgtaatcaataagatttggtttacgtgaccttttcgcatcttcattcctcctgggatcgtaactgaatgctttatatccccatcatcgccagaagaaattcatattatacgatattttaagaaatctcttgtttctcaagatagaatgtaccagtcggaatggatgcccattttggtgtgttgtgatcaagcctgatgacaacaaccgtcatatcgtcgtcaatttgacccgctcttgttcgaatgacctcttccattaataaatcagcaatctcttgcggatcttctgttttaaagcttttcattttgcgcttcacccacagatcatgattttcaatatgctttggtccttcgaaaatgccatcactcatcataatcagcagatctcctgccttcatctgttcactcactacctccacttcaaattcatcaataatcccaatcggtaagttgctcgcttgtaccttcatcacctgatcaccccgtttaataaagctgggtgttgaaccaatcttgaggaacttacagctcgcatcctgtaaatcaataattgataaatctaatgtagaatagatttcatccgtcgttcgtaaagataaaatactattaatggttttgattgccactttttcattgatacctgacgccaatattttttctaacagcttaatcgtttcattgctttcaaaatgagcccttgctccattgcccattccatcactaatagctgcggcatatttgcccgcacccagctccatcatgctgtagctatccccagacactaaccctccgcctttcgctgcatgcgctacgcctgtagccactcgatatgattttgcagagccgaatacaacgtggcaatagcctgttgggtgctctgcacactgctctgctttgactaaaatctgttcttctaaaatatctgagagcatgggagcgatgattttttcacattcaccatgtccttggcaatatgggattctcatttcaatatcgacattcccctgctccaagctataaatttctacttgctgaatttcaatcccaaagtgctgaagtgcttctatcatctgctcttcttgaataaaatgctgttctctttctcgttttatttcccgggaaaaatcctccatcacttgtgagacccccatcagctgttcggctacaagtcgtctgctgtcttggacctttttcttcagagtctggttggctttatagtaagcgatctcctcttcaatcaattcctcgacatgttttgattttgagcagtgctggctaaatttcttcttcaatttccggttatgctcgtaggttttttcatcagattcatgcataacttgtttcatcagttcataggttgtatcaaagttctgcacccagcatttatttttcttatagcacgtttgacaggatcgttctgtgatcgtacttaaaaaaagatctacatcctcttcctgcttcttttcttcaggaatggattcgtaaaatgtcgcaaaactctcagacagcgcatgaaatacattagaaaattggtctaccttttttgctgtcacatcccgtactttccgggcgtattgctgctgttcttgtacatgctctaccgtaccaggaatatatttcgctaccttagaggtcactgattgtggcgtgagtaagaagagcgcaactgcaataagtgattcatacagcgtggtcacaagacctgctgatccttctccgtatagggaaataagtaaggaacccacaattaagccaatggctgcgcctgctttcttcccctctttcagcaatccccctaataagcctgaaaaggcaagaagactcatctgataaaggtttccgatgttagcgagaccgagaattaatcctgtcacgacacccaccgtacaaccaatacttgctcctccaataaaggcaaagctcagcactacataacgtgacaaaatatgctctgcctgcatcccttgaaatgtgataccagccagacctgttaaaactgaggcaattaaaatcataaagcaaataatttcttcaacctttaaggagtgtttgattttcctgactgtaaaaatcggcaggctttgaaggaaaatcagtgtcaaaatgaaggcaagtcctgcttcaacacccgccatgacgtaatcgtagctttgcatagcaccttgctctaggtaaacaaatgctcctcgggtgatcagcattgacagcacaatgacaaccggcaatgttttcactgggtctttgatgatgaaagaaaccaccttggacataaggagaaacacgatcaacgacgcaaacacaaacaatgcgttttgaggtgatatcgtcatggctccagcgagtaaagcgagacaagcaagcatggccttatctcttttgataagcagcatggagccgaagaaaggcagagcaaacggcataatttcagataaaataaaggctcgtcctaataaaaaaccaagtacaacataaataaaccctttatagaaaaaaagagaatgcgtgtgatgaagaaacaggtttttcatcttttttaaccctgcactgattctttcaaaccccgctcctgttaaatcagttcttctttctagtttttccatcttttcatcccccacctgatattcgttgcttgtcattatagcgaaggtgaaaaagaaattttgtcaaaagaagttgtcgtttccataaaacgttcgacgctttattcgtcaaagaggcatactttcatgaaagtcgatgtctttcatcagaattttacgaagacacaaaaaaacagccttcctaaagaaagctgttttgaagatgacccgtacgggattcgaacccgtgttaccgccgtgaaagggcggtgtcttaaccgcttgaccaacgggccttgcttttatgttctactaaaaaggatagcggcggaggggatcgaacccccgacctcacgggtatgaaccgtacgctctagccagctgagctacaccgccataataaaaatgcgctaagaagcacaagatctataatacaaaggaatcgcttgtccgtcaataggaagttctaaattaaatgaagaaatctcaaaaaatgtcgtatggatcaagaaaaaaagcacctgcggacagcaggtgctttgttgtgaaagatatatagaaagcagcaacaagttaacctcttcttgctccgcgtcccccacgttttgattccgtgttacgttttaaagatgttaagcggtcttcactatcttttaagaatttgttcattttttgctcaaacgattccttcggacggaaatcatttctgctcggtcttgattgttgttgttgaggacgatcttttgcttttttaatggacaagccgattttaccgtctttttcaacgttaatcactttcacttcaacttgttcaccgacttttaaatgctcattaatatcttttacatagttatcggctacctcactgatatgaacgagaccagttgaaccgcctggcaactccacaaaagctccaaaatttgtaatgcccgtaactttcccttgtaacttgctgccaacttcaatcgacataaaaaaagtgctcctccttagacttataaaaaaatctcatttgttcaattatacataaactgaattttaagtgtcaacaaggctaatcgctcttattgcccacatcaaagattttttcgccttttttggacatataatagtctcgtcgtgccagttcgagtacgtattctttgcttttcagctttttaatttcatcagaaatatcttcctgctttgtttgtaattgcttcaattctttttcaagcgcaaccttcttctcttctttttcctttaatgaggacgattgcgaccagagggcacttgtcaccaagacagcaaacatgagcacaatcacaccaaacacggtaagccttctaaggagtccacggcgtttgcgttttaagcgctgtgcttgctgttccatttgtttttggtaatcattttgaatttgtgcgatatttctttttctcttgttcaaggttgaaggcctcctctcttactttgtccagaattgtttccatttcgttttgatggtaccagataatttcttggtcccttgtaaaattcctgctcctttagagaaaaacaatctcattgatgttcgccatttttcgggaatccgatgaataatggtcacattaagtaaccagatgagcggataacaaacaatggacagcaccttccacacgagccgaaacgtaaaatgaacaagacgtaagagcaagtggagcaagaacataatagcacttataatcaatgtcagcagccagcggattggctggaagacgatggacatgaccagccgtttaaggacgagagcggtctgatacacacacatcatcataaacttgagaatgttcatatacagctgtttcatcaatgcctgatacatcgaaaaacctagtgcaacggctagaaagatataaagcctgaattctccttcatttgtcagcagcaggacataaaagaataagaggccctgtaccagccaaaaaaggagatcgtgtataaccaaaagccattttgctgtcttttcccgattcacaaacagcttgtacgtatcaagcgatgcgcccagccagatgcccatcgctaccatcgaaagcatcgtataaaactggactgtcagcgtcatttaaacagcttgctaaaaaatcctttagctttctccccgtgctgctcatctacataaattaagtcaaagacacgccctttgatcgatacaacgcctttttcgacgtctaggtttttcatttgcagattttctccacggatagcgagaatccccatgaccgtctcaagcagaaattcttcattatcaaagctttccacctgtttgacaccggtaatatctaaatgctttctgtttcgcattgtgacattgtgctccgcttctgatgacagcttcgtgccttgaggttgattataatattgattcatttatacatcccccatatctcatacttgcattgttactgcattgtatgtgacaggaggatcatttagaacaagccctattctgctgttttttcttcttttagcacagtatacatgccagcggcttcttcttttttcgtcgtgtcctttaactcgttgacttgaaccgtcacaagtttttgaccaaaacggatttgaagctcgtctccttctttcacgtcagagctggctttcgcctgtgtgccgttaatagaaattctgccttgatcagctacttcttttgccaatgttcttcttttaattaaacgggacacttttaaaaatttatctagtctcatgtatgctcacctctttctatacgtttggcatcgttccatagatcgtccatttcctctagcgttaagtcatctaatgaacgtcccatgtcctttgctttttgttcgatatgctgaaagcgacgcatgaattttgtgttggcggaagcgagtgccgtttcaggctctagctgatagaaccttccaatgttgacgagaacaaacaaaagatctccaaattcatctttcatctgcttcgttgcactttcgtccggcttctctgccacttcaacgagaaattcctgcttctcttcttcgtatttgttccaaatatctttcacatctgtccaatcaaagcctactttggcggctttcttttggagcttatatgcctttgttagtgctggaagcgtcgccgggatggattgcaaaatggaggctgcccgctccggcttctcctgctgcttgattttttcccagttggcgaccacatctgctgcttcagaaacatttgtgtcaccaaacacatggggatgtctacgaatcattttttctgtgacatgctggatgacgtcaccaattgagaaaaagccgtcatcttcaccaatttgggcgtgaagtaacacctgcagcagcacatctccgagctcttccaccatatggtctggatcatcttcatcgatcgcttcaagcagttcatagcattcttcaattaaatatggtttaagtgactcattggtttgtttttgatcccatggacagccgcccggacctcttaatgtacgtatgacgtcacggaaagtgtcaaattgttgataaagcagcttttcatcttgaatcggaggtacataaacactcgttaagttatttatcgacacatctcgatcaagttcaaataaaggaacggcagtaatctgttcctgactgcttccagccgcagtcacaatatagacttcataatcgtcaggaagcttttccatcagcgtgagtttcacattcgaagcggtcagctgatcatatacctgacaaatgaggacatgctgggtcaatttcagatcgtccgctctcatatctcctgcatcaacgaattgtaatccctcgattgggtcaatctgcaaggagttaaacgtcgcatccaaaaagctttgtccaccagcaacagacacctcaatcccgcgctcttgctgctgagaaactaatagctggacggtcttttctgcgacaaatgggtgtcctggtactgcgtacacaatatccttttccgcagcctctgtaaataaaatttcagtgatttcctgatagaccgaatcaaactgatcgtgtttttcataaatttcatcaaaaaaggtcagcgatgagacctcctgcatcaactctgcggtaagcggatgatcctgcgttctcataaatacttctttcgcctgcttcagctgcttgtatacaccgagcgtcagctgatccatgtcgcctgccccgagaccgacgacggtaatcttacctgccatttcgattccctctcatctgtttaaaatataaaatcttttctcctaatggaatgagtctccattcctcgtccgtaaatacttctagcttaagaatactatataaaaaggcgaaaccaccaataaaaactgacgtcaggctctctaaaacgaaaaaaggacgtttttcaaagggaatgacccaagaaaacagtgcctgataccctattaagacaatggccatgaaagcagccgataaaagaattttcactgggaacagctctctcaacgaaatccatcctttatgcctcaaataaacggcattgagcagagccgcagcgagaaaaccacatacggttgaccatgcggcaccgtagatgccaaatagcgggacaagtgcaagcgttagtatccatttcaccagcacactgagaatcaccacaacagccggatacacagtatgcccgagcccttgaagtaaagctgcttgcgtaatcgcaatcgatgtaaatgcgatggaaatacagaatatttgcagcgcatcggtgcctaagtcattacgaaaaagcatggtattgactgacgctagaatacaaatcagcccaactgctgaaccaatccctaaaaccgacgtggtcttaaacgatgtacgcactttttgccttatcgcttcatgctctccattcctcatggccgccgataaaaatggcacaagagaggttccgatgctaatggcaaacaccgtccctagctgtaagaacggctgtcctcggtcatacacaccttttgccgcttttgccgcggcttcactcagaccctcactgcgcagcaacgcatacagatgaaaggcatcaaccatttgcatccataaaatgagcaatccgctgacacaaatcgtgaatgtatacagcaccaaactcttcaaaacatcctttttccgaagtgtcgcctgtttgcttgtcatacttgcagcaggctgttttcggtatgtcagccaaagaaaaagaagtagtataagcgaggccgcactccccgctatggaggagaagaccgcacccgcccctgtttcataaagcgaatagccgcgcctcacgaaatagaaggataaaacaagcaggacgcctaccctgatgagttgctccaccaattgagaaatagccgttggaagcatcataccgtcactctgaaaaactcccctcagcatcacggtaagcggaagaaataaaaacacgaaagcactcatttggatgagcaggattaattgactgtccgccataaggctcgcaattctgcctgctcctatgtaaagacaaaaaaataagaccaagctcagtaaagtgatatagaccaaggatacccttgtaatgatccttcgattctcttccccatgctcactcagaagcttggacaccatgacaggaaaccctgtggtgccgagcatgatggcaatgccaaggaagggatacacttgctgataaatataaaaccctgtgtctcctacgatgttctggaacggaacacgataaacggcacttagaacctttgataacaagcctgcgatggtcaaaatcaccgcaccctggaaaagccaatgcggctgattcacagcatttttcatggatgactcctttaaaaatagatctacagttaaacgcactcattatatcatacgtgaatgaaaagccgtttctttctaaggagtagacggcacattcctcgttttgtttcatcccatataaaaaacgccgacaaaatcaaatgatttcatcggcattctttcattttatctatatgatatagaattattagacctaatgttccatttgacgggctaagaagccagctgccgtttctgccgctttatgctccacttctcccattgaacgctctttagaaaataagacgacggcgccaatcggatctccgtttgcaacaataggtgcaatggtataagcagatacgtcatcatcaataccatcgacaagttgaatttcttttttgctttcttctaatacagaattacgctggtccattgttcgttcaagtaaatcactgatggatttgtttaagtactcttttttcgaactgccggatacagcaatatacgtatctcgatcacagatcaggatggaatgacccaaactgtcgaataatgcatcagcatattccttcgcaaagtctcctagctcactaatcggcgaatatttcttcaaaatcacttctccatcgcggtcgacgaaaatctcaagcggatctccttcccggatgcgcaatgttctgcgaatctccttcggaataaccactctacctagatcatcgatgcggcgtacaattccagttgctttcattcactgctgcctctctttcgtttgatgatgtgttgggtgaatggaacaaaagcgtccactttatgcaacattcaccacttgaccctgagtttagtatccgtcacatcaaacgtaatatacacgagagacaaacaaaattttatgaagatggaatggtttcttttttcacttcttgaaggcctcgaagcatattcagaacgatctcaagccattcctcagtcttcttgcctttcgtttgaacagaaataatcagcttgctgccttccattcccaagcctatatcacgaccatatttactgctgagcgcaaataatttttgaccgtcgatttcactgcttgcttgctcttcaagagtaagcctgacaatgcctttctccatcttgatcagttcgacacgttcctgcactgcgtatactttcatcgtcgcaatcgtgaacaagtccgccacttcttgcggatattcaccaaatcggtcgatcatttcatcttgaagctcttttcgctcttcgattgatccaatcgctctgaactgtttatacatctcgatcttttgcttcccatccgcaatgtaagtgtccgggatgtaggcatcgatttgcagatcgatttccggttcgaatttatcttgagctgttgtatcgcctcttctttcctcaatggcttctttcagcatttgagaatagaggtcgaatccaacagaatcaatgaatccatgctgctgtgcaccaagtaaatttcctgctcctcgaatcgttaaatcacgcatcgcaattttaaatcctgatccgagctctgtgaattctttaatagcttgaagtctcttctctgctacttcagacagaactttatcttttcgatacgtgaaataagcatatgcgacacgattcgagcgtcctactcgtcctcttagctggtacagctgagaaagccccattttatccgcatcgtggacgatgagcgtgttcacatttggaatgtcgactcccgtttcaatgatggtggtactgaccaatacatctgattcaccttcaaggaaattgatcatcactgattccagctcgttctcactcattttcccatgtgcatagctgactttcgcgtctgggactagcatggagatttcatctgctttgcgttcaatatcttcaacacggttgtaaagaaagtacacttgaccgccgcgtgctagttctcgctcaatcgcttctctgactaaagcgccattgtactcaaccacataagtttgaacagggaaacggttttcaggcggtgtctcaataaccgataaatcccgtacgccaagcatagacatatgcagcgtacgcggaattggcgtagccgttaatgtcagtacatcgatattggctttcatctgtttaattttctctttatgcgtcacaccaaaacgctgctcttcgtcaatgatcaacaaacctaagtctttatagacaatatctttagaaagcaaacggtgtgtgccgatgaccatatcaatcgttccgtttttcagcccttttaacgtttcggttgtttcttttcttgtacggaaacggctcagctgagcgattttgacagggtagtcttggaatcggtccataatcgtgtcaaaatgctgctgcgctaagatggttgtcggtacaagcagagcaacctgttttccgtcagcaatggctttgaaggccgctcgaatcgccacttctgtttttccatatcccacatctccacaaagcaggcggtccattggacgctcccgctccatgtcttgtttgatttcgtgaatcgaacggatttgatcatctgtttcctggtaagggaacgctgattcaaactggcgctgcatctcatgatcaggcgagaaggcataccctttgcttgcctcacgttccgcatacagcttaatgagatcatctgcgatgtcctgtacagatgtttccacttttttcttcacacgtttccaatcactgccgcctagtttgtacagctttggttctttaccttctgatccgacatacttctgcacctgatcaatttgttcaaccggtacataaagcttgtcgcttccttgataatgaatatttaaataatctttatgaatgccgccgatttcaagcgtttcaattcctaaatacttaccgattccgtggttaatgtgcaccacataatcgccgacttgaagctctgaatagctcttaattcgctctgcattggtcagcttttgcttacgtgcctgcttcttcacacgtttcttgaagagctcgccttctgtgatcacggcaattttcgataacggcagttcaaagcctgtttgcagctcaccttgtaaaatatacacctgtccgcttacaagctcggcgtccggcttggcaagagcggcttcaatgtcataatcatgtaagacagaagatagtttatctgtccgctcttcatccgcacctaagaagacaactgtgtattgttgttttttgtagcgttcaatttcactcgcaagcacattcatctgcccgtggaaattctgcatttgcttactagatacattgacgatattttgcggatttgtctgctggacatgtctcagaaacaaggagtagtacagaatagaccgcgattgctgattgatcagttgttggaacgggaaagaaagggataaatcatgaaggatattaccttcttcaagcaggctaattgtccaatcagcttcttcctgttcaagctgttcttccatctcctgaattctgctaatttcatctaaaataataatcgtatcctgtgatgtgtaatctagcaaactagcaggcttttcatagaaataggacaggtacttcgtcatttcctgtgtcacgataccttctagcagcttctctcgatcagcagaaatatgctgatgaagcagttctttttgctggtctgagttaaatttctttaagctcttcgcaagtccttgatcaagctgttcaatggctctcactcgttcaggacctctcacaatcagctcttttgcgggaccgattttaatctcttgaagtgtttctaatgaacgctgtgtatctgagtggaacgttcgaatcgagtctacttctgtatcaaacagctcaatacggatcggatgatcttccgttaacgaataaatatcaatgattcctccgcgcacactaaaatctccgggcgcagcaaccatcgacgtccggtcataaccgatttgtacaagttgttttgaaaacgcctccaaatcaatttcttcaccgagctttaaatggatctgactctccttccagagctcaactggcggaagcattctgcgcaccgctgcagccggtgtgacgataatggggttttctccattcgccagccggttcagaacatctagacgctgtgctctgagctcagggctggcaacggcaatttctgaagcaatgagttcattaacaggataaagaaggaccgagcgatctgaaatcacactggcaagatcatctgttaccttctgcgcttgatacaagttgtgagtcacaataaacatcggccgcttaagttcgtctgatatagcggctgtaaataaagatctgacggagcctgatagtccggcgagcagctgttcttttaacccttcctttagcccattaaaaatggactgaaaatcatcactttgtttgataaatgattgtatatttttcatttggctcctcctccctgcttgtttaaaacagaaaaacgctttggtctattatctacaccaaagctttttattgaataaaggtatgatactgatggtaatcaggatttctttcgagcgcctcttggcaatcctcacaaatggtttgtacatgtagatcaccattttccctataagaaatcatatcgtttctttcctcatttgttaagtgatgaaatccaagtgcttcactttgaacagcggattcatctagactgccaacctttacaccacagtgccggcagtaataatgcaaagccatacgtgatcctcccatgctgagattttataatcagtatgtgctttgcttatcattcttataccttcttgttaaaatcattcatcacttctaaaaatggctttgttaaagccgcctcgcaagcttcgacagacgcctgaatggctgatgcaatgtcaggctgctcctcttcagaaaagcgtcctagcacgtaatcgacgaccttcatgccattttgaggacgtccaatgccgatacggaatcggtcaaactcaggtgaccctaaatgctgaatcaacgatttgattccattatgcccgcctgcacttccttttgtacgcaaacgaatccgcccagttggcaaatcaagatcatcatagatgactttcaaatgttcaagtggaatatcatagtaatccattagcggacgcacgcattctcctgataagttcatatatgtaagcggctttacaagtagaaccttttgccctgaaacaaaccctgttccaaattgtccatggaattttgattgatttaaggggatgtcccattttttcgataattcatctattgtcataaacccgacattatgtcttgttttttcatattcttttcctggattacctaatccaacgaatgcaatcatgaaaccaataacctcctttgtcacaaagcacacgcctaaaaaatgagccaataggattgccccatgtaataacgtatgaattcttttcattctagcacaaaagacgcaaccgcgggagggttacgtctctaaatgaccagttattctccatcgttatccttttctttaatggcctcaggttcttttggttcgtcttcgctatctggctcaggaacctctgattgctgaggcggcaaaatggatgcaacgacttcttctggatcgttattcacttgatatgatgactgaacagacaaatcagcgactgttaggacatcatttacttctaagtttgtaatatctgcttcaatatgctgcgggatatcttttggtttcgctgtaatggatagttcaaatagtggctgctgaagcacaccgccatcttttacccctttagattcgccaatcagctggacaggtacatctgcttcaatttcacgctgtaagtcgaccacttggaaatctgcatggacaagctcatttttcagcggatctgtttgtaattctgtgaccatcacggattttgtttcaccgttcacgtctaatgtgatgattgtattctttccttcatcacgtaaggtctttaataaatcgatgctgtctagtgaaacagccaggttgtctgtattttttccgtatatgacaccaggaacgtgtcctgaatgacggattttttgcagtgtggaacgtttgaaatcagttcttttatttgcttttaaagttgccatattcagcaccatcctatttcatttttgtcactactctcataattacccataagcgaatcattttaaacctatttgctctgaatgatgacagcaaaaagaccccaagctgatgcctagggccttttttaatcagaaaattagctaaaaaggtagctcacagattcttcttcatgtacacggatgatggcttctgctagcaaaggcccaactgaaagcggaatgaatttttcaactttcttgtcatctgttaagtgaatactgtttgtcacaaccaattcttttattttagaatttgtgatacgttctactgctggtccagacaatactgggtgagtacagcaagcatatacttcagccgctccattttccacaagtgcatttgcagcaagtgtaatggtaccagccgtatcaatgatatcatcgatgagaatcgccgttttgccttcaatgttaccaataatgttcatcacttcagcaacatttggcttcggacgacgtttgtcgataatagcgattggcgctttcaggcggtctgccattttacgcgcacgtgtcacaccaccgtggtctggagacacaacgacgatatcattcaaatttttctgttcgaaatagtttgttaagattggcacagccattaagttatcgattggaatatcaaaaaaaccttggatctgcggcgcatgaagatcaagtgcaatgacacgagtagcacctgctgtttcaagcaagttcgcaaaaagcttcgcagtgattggctcacgaggttttgccttacgatcttgacgtgcatatccgtaataagggatcacaatattgaccgttttcgcagaagcgcgttttagtgcatccaccataatgagcagttccataatgtgctcattgactggcgcactagttgattgaatgacataacaatcacagccgcgaatactttcttcaatattgatttggacttcaccgtcactaaagcgtttaacagagctctttcctacatcaactccgatacgatcggcaatttctttagcaagttcagggtttgaattcaaagagaatatctttaaattcgcatcagcataacgattagacatggtaaacctccgggtatttggattattttttatgaatatttttcacataatcttctttattgacttgtcttgctctagcaatagacaatgcatcctgcggtacatcttctgtaaccgttgaaccagctgcaacatatgccccttttccgacagtgactggtgccacgagatttgaattacagccaataaaagcgccatcttcaatcttcgttaagaatttgttcttcccatcatagttgactgtaatagatccacagccaaggtttacatcagttccgacctctgcatctccaatatagcttagatgagatgctttgctgcggtcaccgaaaaccgttttcttgatttcgacaaaattcccgatcttcacttcatcgccaattttcgacaacgggcgaatatgagcaaacggcccaattgtcacatcgactccaacctcactatcgcagacgacagattgcttaatcactgtgcgatctccgacgatgctgtcaacaatttcagtgtttggcccaatagtagcgtctgcaccgattttcacattccctttgatgaccgtcccaggataaatgattgtatcttcaccgatgacagcatctggtgaaatatacgtgttctcaggatcaatcaaggtcacaccattcttcatatgctgatgattaatacgtcgcttcatgaattgctctgcttgtgatagagcgatacgatcattgactccaagtgtttcttcaaaatgcggtgtttgatatgctgcaaccgtttgcccttcattctttaaaatttcaatgacgtctggcaaatagtattcaccctgtgcattttcattcgatacttgctcaatcacacggaagagatcttcatttgaaaaacaataggtccctgtattaatttcattcacttgacgttccgcatcattcgcatctttatgctccacaattttcacgacagcaccggtttcgtcacgaataatacgaccataacctgtcgggtcatccgcatgtgctgttaaaatagtgactttcgcttgatgtttttgatgctcgctcaacatagcttccattgtttccgctgtcaataatggcgtatcaccacaaatgacaatggttgttcccttttcctgcgcaaggaacgactttgcttgtttgacggcatgtgctgttcccagctgttcttcttgaagtgcatactcacttctgtctccaagctgctctttgacgttctctgctccatgaccgacgatcgtcactagcttggctaaagaaagctttaacgcttcatctgccacatgctcgaccattggctttccgcaaactggatgaagtactttgtatagctttgacttcattctcgttccttttcccgctgctaaaatcactgcgaaccgcttatccattgattggcctccaatatccctattatccatagaaaaatatatcctaaataaggactgatttcaaggatacaagaggaagtgcaataattttctaatggatgaaagacataagaaacaagagaaaaaacgcaaaaaagacagcatttaaaagaaaacattccattttctcttaaagctgtctttttggattcacatatgattaagaagctccagcttcttcatattcaattgtttcttcctcttcgcctaagcgatgatattcatttaatacagcatcttggattttaccccgagtacctgaattaattgggtgtgcaatatcgcgaaactctccatcaggcgtgcgtttgctaggcattgccacaaacaacccattgtttccatcaatcacacgaatatcatgaacaacaaattcgtggtccagcgtgatggatgcaatcgccctcatgcgaccatcggtattcacgcggcgtaatcttacgtcagtaacttccacagtagttcaccaccttttcccaatataaaagcattacttaggtattcaacgattgtggtgattctcctgctctttttttaaactttttttgaaatatcgggatatttatacattatttgtcattttggtgacgacgcttacattctttgcgtgaaaaaaagacatcatgatgatgtcttttcctgcatatgatgaaaccaaacggctttcgttgagactgcctgtttactttactaatgcaattacttcaatttctacgagtgcatccttaggaagtcttgctacttccacacatgaacgagctggcttatgtgtatggaaatactcaccgtacacttcatttacttctgcgaattgttccatatctttgataaaaactgttgctttcacgactgtctcaaaggaagcacctgctgcttcaagtacggccttaagattacggaacacttgatgtgtttgttctttaatatctccatttacaaagtcgccagctggcgttaatggaatctgccctgagctgtaaaacatgttattgacaataatcccttgagagtaaggtccaatggctgctggtgcatgtttggtttgaacaacttttgtcatatcaatctctcccattcaactacatgtttgatcaaagcttaagctttcgaatgaaaaaactcgtggaaattgccttcattgatctcaatgatcttctgcttcatatcaatggttgaaagctttaaaagcgatacatattcatcaacgagacgttcatttacgccttcatcttctaaaagaacaccgatccctgcaacatttgcattaaattcctcaagcaaattcatcatgccgttaatggttccgcccgctttcataaagtcatcaatgattaggacattggatcctttatctaaactccgctttgcaagtgacatggtttgaattcggttagacgaacctgacgcgtagttaatacttacagttgatccttcggttaccttattatcttttctaacgatcacaacaggcacatttaaataacccgcaacagaataggcaattggaataccctttgtcgcaacggtcatgacgacatcaatcgcacggtctgcaaagatggtcgcaaacagcttaccgattttcgcaagaattgatggattacctaaaacatcggttaaatataaataaccgccaggaagtacacgttcaggagtcgatagagcctctccaatatcgtttactacgtcgtctgcttcttttaggtgaatctttggaatatatttcactccgccagcagcaccaggtacagtaagcaatgtgcctattccctgctgttcgaaggtctgtttgataatcgttaagtcttcactaatagaggacttcgcagattgatatctttctgcaaaaaaagttaacggtactagtacgtgcgggtgggctaacaaataatttgttaagtccaccaatctgccgcttcgacgaaacttcatgaacttacccccagaacccgaataatttatgataaatataacttaatatacggatttaatcaagggcattttgttcgccgatcatgcggacagcgtatacttgatcacaaaatcctctcagtccgttatatattctttgtaccttcgattcatattgaatcaagccaaatactgtagggccgcttccactcattaaaacagcgtcagcaccgaaacgcttcatctgtcttttgatcatatctacttctgggtacatctttaatgtcacagactctagaacgttgccgagtgagccgcacatctctttataatctttcgcttcaatcgcttcaatcatccgctttacattcgggtgttctactttgcttgcgtcatattgtctatagacttcagctgtagataccccaatcaccggcttcgctaaaatcacccagcaatgcggcggtgtcgcaatatgcttcagcttttctccacgtcctgtcgctagtgctgtgcctccgtgtacacaaaaggacacatctgagccgatctccgctccaagctcagctagttcatctaacgtgaggttcaacttccacaaacgatttaagccgcgaagagctgctgccgcatcactgctgcctccagctaaacctgctgcgactggaattgttttcgtgatgacaatggaaacacctttttgaataccgaaccttgttttgagcaatttagccgcctgataagccaaattacgctgatcatctggcacgaatcgattatgagatgatacacggatttcatccttgtccagctccgtcagctctagtcgatctgcaaggtctattgttgtcatcaccatctccacttcgtgatatccatccggtctttttccatgaacatcaagtgagagattaatttttgccggtgctttttctaaaatacgcaaacatttcacctacttctccatctaaacataagtatcaatattgtatcacatttgatggatctgatgaatataggcttttacgccgagcacactgactttttcatcaaaaaaagccagagacacccgaggtatccctgaccgtttttctatcgttgattctcatcctgagccatgtgctgttgagctaattcaatggcacgtttgaccatattacctgcgtcacgcgcacgaatctctccccagcctccatttttgacggtatcataaaatccaagatccttcgccagctcgtatttgaactcatctgacataatacctcggcgtctacccaaacgaaacagcccctttagtcgagaattcgaatcagtgccactgcttgtgtggctttcttattttgtatcgaatcctttcttttacccctttcaaaaaatggacagactcccattcagaaaaaaaggcaaaacaaaaagcagtaaacaagaagttcactgcccattaataggcgactgagctagcggtatcatcgaacgttaattcgaccgtctcagtcagtatatctgcataactataagaaactctttcaaacgaattctcatcttgatctaattgaatcacaaatacagaagggtacgtttcagctaaaatgcccgaacgctcaattgttttacggcggcccccgttagcctttaacgtcaaacgtttacctaagttaccatcaagcgatcttttgatgtcggacaaagtcttcgccattgcatccacctcactgagataattatacaacaacggctcgtttttgtcaaataaaaattaaattatatcaacgaacacgagccattgtcaacaaaataattttgacaaacttctaccttttcttctccctatttttctcaaattccggtgaattatgtatccttttgcaatttctttttgaacataaaaaaaaccagactgaaatcagtcgggttatgtcgattcatggtctcttttatatggcatacctacccttagaacgcccttcgtctcgatgcctccgaggcctttttctcttgttaatgtatttcggagcacatcccacacgttgattcgatctacaaatggagtgaagctgatcttcgcaacgatatagacggggtcgagcgcatggatattcacacgggaaggcgagctcgcaaaattggcacctgcttggatcaatgattcgaaatgagattgacaggcacctgcaaagatcacaagctgatctaaatgaggaattttccgtcttgctttttgaaccgtttcaacgaaatgacgagaatggcgataggcaccgatatcatgtacgccgcccttttgcttggaatacgcatcatgtcctgtgatgaccaaaatatcaggtcgatattgatcaattaacgagtcaatcatgcttggcattttcttctcatggcaatgtacaccgtacacaggtacaccaattcgttcatatacatccaagcatttctttaggtatgaagcatctccatctaaatgaaggacctttccaggcatgtgaaaatactgctcttgatgctgatattgtccagaagtataatactcttgtttttcccgcagcagctgataatcctgtctaagtaagtcaagcgattcattgatttttcgttcgtcatttttctctctagtcagctgttcctctttttgaaccttgacgagatctgacaacttggcatcagcaatcaacctcacttcattcccatgcaatatggcggtggcttcgtgctgatcggtctcatcaattcgaatgattcgaaacaaaatatccatttgataggatgcccttgtcaccatatctcctatttgaaattgcatgcttttcactccacaatcaggctcatatcctgttggtatcgtcttgcactaaatatgttcgtctttcatatgtgctgttctttctagcctatgcccgaacaagcgaagtggtgaaaaacaaaaaaagcccttaaaacagggctttttgtaaaacattcgacaaacgggcaaattcctcaatggataatgactcgccgcggcgctttccatcaatgtctgctgtttgaagtgcttcttcgatgatggctttatgtttttttccatcaggtaaattgttcatgagattattcatcaatgtttttcggcgctgaccaaagctcgcacggatcaattgaaagaaaaacgcatcattttctactgagacagcaggcgtttcacgaacggttagtttaatcacagccgaatccacattaggctgtggaacaaaaaccgttttaggcacaaccattactgttttcgcttccgtatagtattgaactgcgatagacagcgaattgtattcctttgatgaagggactgctgccatacgatctgctacttctttttgcagcatgacgacaatccctttcaatggaaggttttcttcaagcagcttcataataatcggtgtcgtcacgtaatatggaaggttggcgacaaccatcacttctttacagtcagcaaaattttcctcgatgaccttcctcacatccgcctttaatacgtcttgatgaatgatcgtgacattatcatatggagagagtgtatcgtttaaaatgggcaataaacgctgatcgatttcaaaagcggtgactttctttgcacgcttagcgagctgctcggtcaatgcaccgataccaggcccaatctcaatcacgccggtctcatccgtcacctctgcgtgatcgacaatacgatcgagtatatttgtatcaattaaaaagttctgccctaagctctttttaaaagagaaaccgtatttcttcagtatttccttcgttctgatgggtgtcgcaatatctttattcatcggcttcctcctgcatgacggtctttaaggccgcaataaaatcatgtttggttatttggaacatgtgaaggcgcttttgcagctgcttcgcattggtatatcctatatttaaaagcatacctagtcgttcgcggcggcgtttcgatgcttctcctccgataaggcctgcgtcaaataagtcatctaatgtaatgtcactttccgattcttccatttcctcatggacatgggctaggcattctcgaatactgtccaaggaagcatgctcgacaccaattcctttgtctcgcttcgccttcgcaagatgttttggcaaaaatgcgtgcttacagccaggaaccgcttctgcgatggttttccggatcttctcaccagggaaatcaggatcagttaaaataatgacccctctcgtctcctgagcaagacgcacttgttgaataactgtatcaccaatagctgatccgtttgtttcgatcgtatctgcatcaactgccatcttcactctggcagtgtcatcacgaccttccaccacaatgatttctttgattttcatgtattcctccgcttgcaaaaacaataaacaatttttggttaaaaaatgaaacctttcatgctgtttttgcgtctaattaattagaaaacagtgcttctattataaccaaaaaaacagagggtgcgcaaagccctctgttcatataaatgatttgatgtgtttatttgagtactctaattttcactcgtttatttccccattgataagctgccgacttatttgggacgaacacatcgattttattcccttttatagcagatccagtgtctgatgcaacggcatatccatagccttccacatacactttagagcctagcggaatgacactcggatctactgctataacctttgcacccggatttgcttttaaatcaaagcctgttgacgttctgcccgtacatccagcacagctcgctgtataggctgtcgacgccacataaaattcttttccagacgattcattgcttcttgaaacggcaggtgtcgctttaggctctttattggacacttgtgtaccaatagccactaaacgatccttgctatctttttcagtcacttctttaatcaattctttagacaccactttgccgttttctttcacaatggcatagtgcttcttcaatttaccttcttcaccttttttaagcaccttctcttttcctttttcaagagaacgatcctttttatgtttggtatcaaaagcaattttctcttccactacatcggtgactttttccacccgagtgatctttatatctgcgctctttttagaaaggttactatgtaacgcaggcttgatcttatcgtgcttcttgagcctcagctcttgttgctttaaaaagtcagcgaccgtagtcgaagtggtccacacctttttatcttttcctccatcatttacgctgacctggaaggcctgctgaaccacaagattcatatcctttttaatcttgtcattctttcctggagttacttgatcgtgcttcccaatatctatcttctcattcttcaataatgctccaaccgtctgatctgttgtccatatcgttttctctttcccatctagggtcagatgaaccggtatagccgcatcatacacaatgttcatgttgtcttcaatttttgtatttagacttggagagatatgatcctccgccctggtctttattccaaggtctgaaagcagctgtgctactgtctcttcatgtgtacgaattgtcttctctttaccattgattgaaatggtaatagactgcttagtgagctcatgcgcaccgtaagccgtcccagttccagctaaaagcaagcaaacaactagtaataaaaccttgccttttcctagcttaacagaaaacagatttttcattttttgtacgatgaaaaacgcctccttctcctcggagagattatatagagtatctcaaaacctgtcaacccttcctcccactgtacaaaaatgctcgattgtaaccctattatgggagattgatggaaggaagggaagaaagacttatcgacaacttatcctatgaggaggcgcaaacgtgtagaacattttcgttatgtttcacaattggacaagcttaaacaaggattgacatcatatactgtcagtttataccgaaaacttttttcgcattttttgtggtcaattcagcaagctcttcaaagcttgtttctcgtaactccgcgatctgttctgcgatatatttcacataacttggctcgttacgtttccctctaaatggcgctggcgttaagtaagggcagtctgtttcaattaaaagccggtcacttggtatgtccttgacaacttccttcggttttttggcatttttaaatgtcacgggtccaccgaatgaaatataaaagttcatatccatacacgcttttgcgatttctaggctgcccgtaaagcaatgcataatccctccaacatcagccgctccctcttcctttaagatcgtcacgacatcttccgttgcgtcacgattatgaataatgattggaagattcacttccttcgcaagagcaatttgacgtctaaagacttccttttgtacatcttttggcgacttgtcccaatagtaatccagacccatttctccaatcgcaacgactttttcatgttgagataattctttgatccacagcaaatcctcatctgtcatatcaatggcatcgactggatgccagccaatggctgcatagatgaaatcatactcttcaattaattccattgctcttgtaattgtcgggcggtcaaaccctaccaccacgattttttcgactttttcacttttcgctctttcgatcacctgctctaagtcttcattatattgttcagcatttaaatgggcatgtgtatcaaataacatcgttgattgctcctttcgacaattcttctaaaaaacaaaaggtgttcgacgaaatgttacacgtggaacaccttttgttgatttataaaatttttgttccatttgctagagatcggtctacttcaagaacctgcaatttcccatcagtttctccagttaaaatcattccctgggaaatttcccctctgagtttgactggtgtgagattcgctacgcaaacgagctttttccccactaattcctcaggttgataatgcttggcaatccctgaaacaatttgtcttttttcaaatccaaaatcaagctgaagctttaagagacgatccgcttttttcactggggctgcttccagtacctgtgctactcgaagatcaacttttgagaaatcatcaaatgcaatttctgctccaagctcaggtaattccgtttcttctatttctactttctcttcttcctttggtgcacttccctgcattttctctttaatatacgctacttcttcttcaacctctaaacgagggaacaaaggctctcctttttgtaccgtcgcttgttgaatggcaccaaaagatagaatgctatcccagcttttaagcttctcttcttcaatgccaagctggaagaagattttctcaggtgttttcgttaggaatggcgttaagagcaccgctgtgatgcgcagtgattctgctaaatgatacatgacagaatgcagctcttttcgttttgtttcatcctttgccaacacccatggagctgtctggtcaatatatttattggttctgctgattaatgtccaaacatttgaaagagccaccgagaattcaaggttttccatcgcttcttcataggctttgactgtttgctcagctaccgctttaagttcctcatcaaactcattaactggacccttatagctgcttaatgtaccgtcaaaatatttttgtaccatcgcaactgtacggttaagcaagttacctaaatcattggcaaggtcatagtttacacgttccacgaatccttctggtgtaaacacaccatccgcaccaaatggtacttcacgaaggaggtaataacgaagggcatcaaggccatagcgatcaattaatgtgacgggatctactacgttcccttttgatttagacatcttcccatctttcatcagcagccagccgtgtgcgaaaatttgtttcggtagcggcagatctagtgccatcagcataattggccaataaatcgtatggaagcgtacaatttctttccctacgagatgcacgttagcaggccaatattttttatatttttcatcctgatcagttccgtagccaatcgcagttaaatagttgaataacgcatcaatccatacatagatgacgtgttttggattgttaggaactttaattccccaatcaaaggttgttcttgatacagccaaatcctctaaacctggtttaatgaagttattgatcatttcattttttcttgattcaggctgaatgaacgttggattcttctcataatagtctagtaaacgatccgcgtacttactcatacggaagaaatatgattcctctttaattaattcgacaggatgtccgctgtcagggcttttcccgccaatgacttctcctttttcattccgctcaacatccacaagctgtgtttccgtatagaatgtctcatcaggaatactgtaccagccttcatattgatctaaataaatatcaccttgatcaagcagcttttgaaacacttgctcgatgattttcgtatgtcttttttctgttgtacggatgaaatcatcattcgaaatgtcgagtttcttccataatgattgaatgtctgctacgaccggatctaaatactcgatcggtgtaatattttgttcttcagctttttgctgaattttttgtccgtgctcatctgtacccgttaaatacatcacatcatagccttgaagacgtttataacgagccatagcatcccctgctactgtcgtataagcatgtccaatatgtaattttccgctcggatagtaaataggtgttgtcagataaaacgtttttttcttttccggcatgtcggaacctcctgcatgtgtgtaaatgtcaaaaactcccgcccaatggacgagagcggttatcatcattacatgaaaatgtgttagatcaattcattaaattttgcacttgtgctttctctatgataccatcttagcctttaagatcaagcatatatacatagaacaagatgaaatgatcgaaaaagatgagtttttcgaaaaaaacgacaaacctgtcgacattttgtcgaatattgtcgtatgaaatctatttccagatttacaattgtctaatttagggcaaaagtcttgttaatctgaactcgtcatttctcatattttcatagaaaaaacccgagaaatccttataaatcaatagtttcaaggtcttttgactttaagagtcatattttacaaacaatagtaaacaaaatgattgacgatttatggaaaccttgttatgctatgaatgtaaggaatttgtcgaataatgacgaagataatattatattaagaataagaactctttgggaggagaatgaagatgaaatctacaggtattgtacgtaaagttgacgaattaggacgcgtggtgattccaatcgaacttcgccgtactctaggaatcgctgaaaaagacgctttggaaatttatgttgatgatgaaaaaattatcctaaaaaaatataaaccaaacatgacttgccaagttacaggtgaagtatcagacgataaccttaaacttgctaatggtaaattagttcttagccgtgaaggtgcagagcaaatcattaacgaaatccaaaaccaacttcaatcacaaaaataagtttgatataaaaaaggttcttgcaccgtttgcaagaacctttctttattgttcaatatgataggcatcgtatatcatgcgctttggtacaccacgttcgacggctgtacgtttaatggcttccttcgacgttaatccttcttctatgtaatggatcacgtgttccttttcagataaggacttccaccagacatcttcatttagctcttcttcatcttgatcattaccttgtacgacaagacagaattcaccccggatttgatgctctgcggcccatgtcagcacagactctaaatctccacgaataaactcttcaaattttttcgttagttctctcgtaatggcgatattccggttgccccacacttccttcatcaaagtcagcgtttcttttaatcgatggggcgcttcatagaaaatgattgtttcttgacgcttcttcaaagcttcgagctgttttttcttttcctttttttgtcggtcaagaaaaccataaaagaaaaatggctgaggtgtaatccctgatgcaatgagtgctgtaagtgcagcatttgctccaggtaacggaacgacatagccgccaatattagtaaagtctcgaaccacttcagcacctggatctgagatcgtcggtaaaccagcatcgctcacgagtgcgatgttttttccttcttttaaccattcgattaacttgtggccgctgctgtctttgttatgctcatgataactcgttaatggcgtatcaatttcatagacatgacaaagttttttcgtttgtcttgtatcttctgcggcaatatagtctacatcttttaatgtttgtatggctcgaaacgtcatatcttctaaattgccaattggggttgggacgagatacagaatgcccatatctgattgaccatcaaagcttttctgtgttttcatgtgccgcctccttttctaaacgcatttcttctatataaaggtctttctttttccgtgtccacgttttgaaacgatattcttgctgcatggcttctcttttggttgaaaaacattcatgataatacagctcaaccggccgtcttgctcttgtatactttgctccctttccactattgtggatcgtcagtcttttttgcaaatcatttgtataacctgcatacaggctgccatctgcacatttcaatacatagaagtaatgattatgcttctccatacagtatcgtcctgatttcttctgtatactcttgatcatctccataaacaaaaagaggcgggagaattttcagatctggttttccatcttttataccctctactaagatggtattggcttctttcccctgtttgggataaacaaattgaattcgttttggctcaattcggtacttcttcatcaattccacaatctcaagcagccgacccggccgatgaaccatcgccagtttacctccttgcttcagcagcgtggaagaaacgcgaatgacatcttctaatgtacaatggatttcatgccgagcaattgccaagtattcattttcattcatttcttccttagaaggtgtcttaaaatatggcggattacatgtgatgacatctactttgtggttgccgtagcgtgctggcatatcattcaaatcaccatgaatcaatttaatttgcttttcaagttgattatacgccacacttctttttgccatatcaaacagccgttcttgaatttcgaccccagtaatggaggccttagatcgagtcgaaagcagcaatggcacaatgccatttcccgtacaaagatcaatgatctctcctttttggattggcacatacgcaaatttcgctaataatactgcgtccaatgaaaaggcgaaaaccgttttactttgaataatcttcatatcttcggcgagcaagtaatctaatcgttcatcttctcttaacgaaaccatgatgtatcctttcttttcctgtgaaaaaggcttccgattcagcggaagccttttctcattttttatttaaaaatgacagacagaacaaacagtctccctctttacgaatgctcccataatgtacattacaaatatggaagccctcctgatataaccgagccaggttatcatgaccttctcctatatcagaatgacctggcttctgagcagaatcattctctgtctcagacgatttgtcccgatcagactgatccagacgttcacgcaagtgctgattctccatctgcagctgatgattttcttcaatcacttcaccgatatgatttttcaaatcacctaactggcgataaagagaaccgatttgttcttctaaattgatcaccgtatcaaatagttcctttttatccaaggtggcacacctcgttactcagttgtttgtgcagatacaacgccttcttgtaataattcttcccaagtatattctatcactttttcttgcccagttaattcaacttgcaaaattcgttctaaaatgttgagccctactacctttgcagagccactagatgtctgaatcgtttcaccgatatcgggcaattgttctttcgctgtttcatactcatcattctcatatttcaagcagcacatcaaacggccgcaaagccctgaaatttttgtaggatttagcgacaggttttgatcttttgccatcttaatggatactggttcaaagtctcctaagaatgtcgaacagcaaagcattcgcccgcaaggacctatgccacccagcatttttgcctcgtctcttacaccaatctggcgaagttcaattctcgtcttgaaaattgaagcaagatctttcactagctcgcggaaatctactctgccatccgctgtgaagtagaagatgaccttgtttcggtcaaatgtaaattcaacatcgaccagcttcatttctagcccgtgttcacttaccttctgaagacatgtatcaaaggctgtcatcgctgcttctttgttttcctcaacgatgagccggtctcgttcgtctgctacacgaatcaccttacgcaaaggaagaacgacatcgtgttcatctacttttttattagcgatgaccacttgtccgtactcaactcctctgaccgtctctacaatgacacaactatcattttctatatgaaatccattaggatcgaaataatagattttgcccgcttttttaaaacgaacaccaattacgttgtacaaacttatccctcctgcaacatcaacaccaattgctccatcagcccttgggcattcacgttggattgaagtctctttttcgcttctaatacagcaaggatctggttcgtcaccatctgctgtgtggaatgcagcgcgtgctgcttcattgtctggaataagtcttgataaatgactttatcttcatttcctatttgaatcgacaatacatcacgatatatatataaaagcatatccagacctgtttcttgaaggtctttctctttgaaaaaaggcatccattgatcctgtatataaaaaaatgcatgttcttttcgctggtgtaagacttcatacaattttatcactttcgctctagactctgcaaactgatcatttcgacttaattcgagtgcttctgctaaattattggttaaattcgacaaaagccttgcaagatgctgagatacgccttcttgtaatagctgctgctccaaggattgcggctgcagcggctgaaagctaagcatctgacatcttgaaataatcgtatccagcattttatgcgattgctcagtgattaaaattgccatcgtttcccggttaggctcctctaggaacttcaataaactgttcgcggcattgaccgtcattttgtccgcatgaagaatgatatacatttttcggtgagattccacacctgcttttgtaaattcctcttgcaatgcctgcacttgcgctttcttaatcgattgaccatcaggctgcacgagatgtaaatcgggatggtttcctgactcaatccttttgcagttttggcaggattcacatggtttcactcctgctttcaagcaaaaaaagctcttagccaaaagcatcgcagcatccagctttcccgtccctttttttccttcaaataagtaggcatgcgcaagtcggtctttatcaatactattaaaaatcagccgcatgacgcgcggctgcaaatcattcatgtcatcccagctaattgccatgttatcactctctatgtgtaaaggttaatcaataaaccttttatttctccaatacgttcaagcaaatcaatagaaggtttctcttggtccatcatatcctctgttaattcaatcagcttttcatctaatgctttgactaaagcgagtgtacgcgtgttgccataaatgtcaaagcttcttgatgtttctatatttaatccattatcgactgtctctttcacaaagcgcttcacaagccctttaaacctagccaagtcctttaggtttcgtgactttgtcagctttttaccgaacacttcgatatcactcagcatgaccgtcagctgctctaagcgcattttgccgctttgcgtctccatcgatgctttaaaggaggcagatgtttggcttcctttaatgccttggagttcacgcttttctaaaagcagccgcatatcttgattaattttcacagcaacccatccttagaattgatgaaattgttcaactggcagaataaagacagtagctccaccaacttcaacctcaacagggtatggtacatatgaatctgcgttaccacccattggagatacaggtgcaatcatttgatcacgtttgcggcaattttcttttataagctgtaatgctttatccactcggacatcatcacaaccaataataaaagtcgtattcccagactttaaaaacccaccagttgaagctaattttgtcacgccgaaatgatgttcagtcaatattttcaacaacttgctgctatcttggtcctgtacaacggcaacaattaatttcatttgattggcctcctttgttttaggcacaggtgacatgccgatgtcttcctctatattataacaacgattgggaatgaggtcatatttgatttttctttaatgtgtcctgaatcacccgaagtacttcttcatagacatcctgtatcggctgagacgcatctactacacggaatcgttctggcgattgcgcaataagcagttcatagccttctctgaccaactggtggaaattcagcgtctccatgtctaatctgtttttttctcttccttgattggcgtgaattcgttttaacccttcttcaggtgtaatggaaaaataaatggtcatttgcggcatcgtaccatcaatagcaaagtcgttaattgatctgacttggtcaattccaagccctctcgcatagccttgataagcgagagagctatcaacaaaacgatcacataagactgtgtctccgcgctgcaatgccggttctaccttttcagccaaatgctgccttctcgctgctgcatacagcaatgcctctgttttcgcatccattttcgtgtttttttcatttaaaatgacttcacgaatctgctcagcaatctcaatgcctcccggctcacgtgtcgccatgactgcatatccttgacgttccatttcttcgtacacttttcgaatcactgtcgtttttccggcgccctctggcccttcaaacgtaataaacataccgctcatagtgtctcctcttctatataaacatataattttctctgatgaatgacctgacttgcttgaacatgaacctgatgtccaagcaaacggcttaacgcctcaatttgatctatctcaatacgctctcccttaatcatcaaaggaataccaggcggatagggaataattgattctgcactcatccggcctgctgcatgttcaaatgggacagcctctatgtcttgattttgctcatcagtctcaatagataacgtctcattttggatatgtttttttcctttgatcaatgaatcactttgcttaagagcctgctcgatccgcttgaaaggaacgtccttcctctgttctaagctaagaataagtaaaacctgatgttcgtccgcaagctctggatgaacatccactgattcaagcacccgttttagttcgtaaccagtcagtccttttgttgatcgaatgacgcattttaatggatcggaaagcagcgagtcagactcaaccacttcaagatgagtcagacggttgaactgatctttcagctctgtcagttctttcatgattacatgcaatgtcccttttcctttgatctcctcgacataagctctcgccacatctaatgaggccataattggataagacggcgaactgctttgaagcatcgtgagcaatgttttcaatcgcttcgcatcgattcggtccccttgaagatgaagataggaacccatcgtcattgccggaagggttttatgtgctgattgtaccaccacgtccgctccataggaaagagcagatggaggaaatgcgccgcctaatacaaaatgcgcgccatgagcctcatcaaccaaaacaaccacatctgcttcatgacacatgtgaatcagctttgataaatcagctgcatgtccatagtagttcggataagtcaaaacgattgctcggcaattaggatgtcttgctatggcttttctgactgtatcatccgtcacatgtgttggaacatgcaagtgtgggtctatctcagcgtctaccagaataggcgttgcccctgcaagctcgatcgcatggaagacagacttatggcaattacgctggacaaaaatctcgtctcccgtgcggcatgccgccatcaccatcgccaaatttccgactgttgtgccatttacaaggaaaaagctttgatctgaaccatatagcttagtcaataaattttctgcctcttgaatcacaccagtcgggtgatggaggtcatctagaccttcaagctccgtcacatccagctgaaggattgaagcatagtgggaccgtgcctcatcaaaaaagacatctccattgtgatgtcctggaacgtgaaaagaataaggcttcttttccgcatgctgtgctaatgctgtatataaaggtgttctcaatcaaatcgacccttttcactttaacgatatcttaagtctattataacgttcaaacaagtgaaccgaaagatggtttctcattcctttattggattcgccagctgctgctctgcctcatacatactgcttttcaattgagctcgctcttggcttccatgctctttcacctgtaacgtttcctgtaatgtttcagctaattgacgttggacctttttcaacgtatctataggagcaaaagatgcctcttcaagaagctgtccctgctgcttcgataccttttcatatgttttttggattcggttctcaagagctgagttggcccgctgctgaatatgcgttaacgcaatcgacatttggttgatccatagtggaatagacgcagaaacagttgattgaatatgattggccaaagtatgattcgtatgctggatcatccgaatttgagcattacattgcaatgcaatttgccggcttaacagcaaatcatactttcgttcctttagtctctccacatactcttcctcattgacttcttgactcatcaattgctcctctattgtccggtcaacagaaagttgcgtttctgaaataggccgctgctctaacgttgtcattttcgcttcaactgctgcgacctgcagcgtcatctcttgaaaataagtttgattttcttcaaataaacgctctaataacatatggtccgagattaatacgcctcttgcataacgaagccttgctgacaatctctcgatctgtgattttgcatgttgaaaacgcgatatgatctcctgagtagatcgtttatcccgttgaaaccattttaaaaaaaaaccttgtttctttggcagtaaatcctcaggctccactacatgcagctgctgcaaaaaggtctcaagcacgtctcctatttgatcaatatcttttttctcaacatatttcatcatctgttgtgattgttccaatagtcgttcctgcacacgtgtaccatagaaaagcagtttttgcggattgtcagggatctgcttagcacgctgcacggcttcttttttctcctcatcagataaggtatcaaacacccgaaactgaagatctgtagtggaggcaggtgatggtgtggcgtgatcttccggtttcatcgagtttgactcctttcatctatttcttcatcattttatctgctacttcaagctcaatatgaagagcttctatgtctcttcctaaaacttgctgcaaatcattggtcaattgcttttgcagctctgtcaatgtcactcgggtttggctcaatgtcatttccagctcatgactacgattaggctgattatacaatagtgcatatttctcagttagttcaacgacagaatccaagctttcgaaataaaaacgctgtgcatcataaaatcgatttggctctttttttgttattgtatagattcgtcgtgcaagccgaagaacttcataattatgtttgatcgtttgtacgtttttcacagcaaataaagctttttttaaacgcacgagcttttgccctgcttcttttaaatgctgtttgatatatacataatcactacgagacagtccgtgtttctttaaaaacaattggaaagcagtccatctgctccctacaaacatcacaccccatccaatcatcgcatacagtatcgataatccagcatgatgatggaaaaccccaatactaacggttaaaatcacaagcgaaaaaaaagtagagaggatggcccatataaatgtataaaagattgatttcatgtttatcgactcctatgaataatcaggctctctgtttatcttattatgaattacggatgatgtccaaactaagttccaaaaaacaagaccaatcctttatagctcataaaaaaagaccatctagtggtctatgaatacaaaggcggcgtatgaagatttttaagctttctcacataatcggaatagctaggatccgaggtcgatgtagaaattaactttcgctcacagtctcggcacaaaaactgatgatataaataaattccctttgtctttttctcttcacaaatcaaacaaatcgcttctcgctcttttttgctcattgtgacacctccacttatagcttcagtatgccctagcgctttcaattgtatacaaaattaagaatgttttagatggtagtttagtatatgtatccatgtcagatcgggtgtttgttccttttcttaaaaattaccgcttcagaagcgactagaacatcataccatatttaaattattaatgtcaacaacttttttgttataatgttttttcgtttcttcgtcatcagcgacgtatattaatttaccaccatacaggatcaaagtcaacaatatttctcattaaataataaatttttcaattacgactaaagctgctacgcctgggatgcccaataaaccactgattccactcgttacagggttaatagagacatgtaatcctagactctctccaaatagattgaggcaaaataaaaaaagagcacctgccacaaactttactccgatcagccctaaccatttgaaggggttcgcttgaacacctgacataaacaacaatagtacagctatcaaaattgacccgattacaataacaggttccataatcctctcatctcctcttcatatgaatagtacaagcatatgagaggactatgtaaaatagacctgctatctccagttgtttaaacgtaaattcctctttttcgcttctcttagatagaaaaagtacttcgcttgagcaagctttaattcgaatagaatgtccggtgaaggctcaacgctatttgcgacaagctttttttgtctgttccattcttccttttgcttaaaaagctgttgaattaatttctcatcgaattcttttcgaattgattttctgcgaagaaaacccatgtaccgtacttctccttcctacatctcacgtctgccttctagagctttagacagtgtgacttcatccgcatactctaagtctccacctactggaagtccgtgagcaatgcgagagagtttaattcctgatggtttcaacagtctagagatatacatggctgtagcctctccttcaatgtttggattggttgcaaggatcacctctgtcacttgatcgtcttgcaatctttttaacaggtcaggaattttaatatcctctgggccaattccgtccatcggtgaaatggcaccatgaagcacatggtataagccgttgtattctttcatcttttccattgcgatcacatcttttgggtcttgcactacacagataacagattgatctcttcttgtatcttcacaaatatagcaaggatcttggtctgtgatatggccgcataccgaacaataagttaaattacgctttgcattaacaagcgccttcgcgaaatctagtacgacatcttcctgcatactaagaacaaaaaaagccagacgaaccgcagttttcggtccgattcctggcaatttcataaagctgtcaatcagctttgatattggttcaggatattgcatcttcagttattcctcctagaataaacctggcatgttcattccttttgtgaattgacccattgtttcattcgttaactcatcgacttttttcaatgcgtcgtttgttgctgcaagtacaagatcttgaagcatatcgatatcttctggatcaacaacttcttcattgattgctacatcaacaacttctttttgtccatttacttttacagtgaccataccgccacccgctgtaccttcaaggactttttctgcaagctcttcttgagccttagccatatccttttgcattttttgcatttgtttcatcattttttgcatatttcccattccaccgcgcatatgaacaccactctctttcatttttattaatctttaatttcaattaaatcgtttcctactaacttctttgcttctgcaatcaatggatcctcttcagcagaagtcccctgaccatctgcctgttcatccggctgatgatctcttaaaaattcttctcttattttaccccattgagcgtcaggaacgccaactaattccactctttttcctaacatagactctaatagctgctcaaggttggttcgaacaccgcttttatcttcggcaaccattttacagtgtatttcaaacttgaattttaaaacaaaggcatgagaagcagcagcaactggttcactatccgttaatagcgcagcatgagacaccttattctgctgtttcaagtgggcaaggagttctccccatttacctttaattttttctagctctggacgttttgcttcttttagaatctcgtgaattcggccgacaggtgcacggtatccatttttgttactcgtttgtggtcgaggtgcttcctttttttcttgaggatgatgagaatgagacattggcacaccctcagctcttatcctagatagctcctgttccaacctgtctattttatccgttagcgccgttaaatcagcgttagcatgagcttgtggtattccaaccgttgactgacatagcttgacaacagctacctcaaagaaaattcttggatgattcgtccatttcatttcttggtgacttttattcagcacttcaattgtttcatatagaaattgaggtgtcacacgatccgaaagcgtcacgaaattttcatcgacctttaccttttcaaggaccccctccagatctggtgccgttttataaagcagcatatctctaaagtaaaagatcatgtcctctattaatttagcagcatcttttccctgctgaagtaattcatttaaggtatctaacgctacagcaatattttgatcaaaaattgcttcggctagctgactaatgaaatgctgagaaacagctcctgtaatgagcagcgcatcatcaattgtcagctgctcaccactaaatgagatcgcttgatctaagaggcttagtgcatcacgcataccgccatcagctgcactagcgataatctcgagcgagccctcttgtacatttaggctttctgcatctacaattttcttcattcttccaacaatatcttttgtcgtgattcgtttaaaatcaaatctctgacaacgggatatgatggtaagaggaatcttatgaggctctgtggtagccaaaataaagatacaatgagcaggcggctcctctaacgttttaaggagggcattaaatgccccgatagagagcatatgtacttcatctataatataaaccttatatgtaaccgccgaaggagcaaatttcactttatcacgtatatcacggatttcatctaccccgttgtttgaggcagcatctatttcaatcacgtctgaaatcgagccgtttgtaatccctttacaggcatcacattcattacaaggttcactcacaggtgacttttcacagttcactgccttcgcaaagatcttggcagcacttgttttacctgttcctctaggacctgaaaataagtaagcatgagaaaacttcttctgcaaaagggcattttgcaacgtttttgtgatgtgttcttgtccaacaacatcctcaaaaacttgaggtctgaacactcgatacaaagcttgataactcacaaatacgccctcctccatttatcatcttttttattatacatgatgcaccgatcaattcaaaagcacacctttattttctaataaacgaaaatgatgatttcaactatagattttctactttctatgaatcaaaaacgtgttttctagattttcgaattgttctgcaacaccatggagaacttttgttcctattgtgattaatggaaaaacaaaaagactctaaaaaggttttttgcctatttgtataaacaaagcagctgagctattctttaaacagcaacaaaaaactcacctagattaactaggtgagttacatttaatattgatttaccgtgcaccttctgtcgattcgctaccccaagcgttacttaaacagttagctcggcccaggcaaccctgcggcacatgagaggtttcacttaatgctgcttccttccggacctgacatggttcatgaattcccattgcgcaggacccagacgtcaacaccacttatttaaggcagaccttgaagtaaacgaaccttgagaagggattcggcctcgctagagcggattgcgagtacagggcaccgctacctccccgcttagcacggcaaaatgaatattaaattgttagtgacgcagacataagtataccttcttatagctgaaattgcaaacgacatccattcatttacttttggcttgtttctttcgctggcggagatttcggaagaactgacttaacagctcaccgcactcattttcaagtacaccaccaatgacttcagactgatgattgaaccgttcatcatccagtaaattcattaaagtacctgcacatccaccttttggatcgtatgcaccgaaaacgacctttttcactctagaaaggacaatcgctcccgcacacataggacacggttcaagcgtcacataaagtacagcatcttctaaacgccagcttccagtcgttttacacgcttcatcaatagcaagtaattctgcatgtgcaattgaacgctgctctgtttcccttaaattatgagcgcggctcacaatttggtcatcaacaacgatgatggcaccgattggtacttctcctatttgttctgcttttaaggcttcagaaatagcttcttgcataaactgttcatctctcgtcatagcacggctctcttttcatgttttttaaaaggatattgaggttaacatattagcacaatcttttaagggggtcttactttgtcaaagcaccaaaaggcactgcttattatcgacatgattaataattttgattttgaaatgggacatgtgctcgctgataaaacagagcaaatgaccaataagattttagctcttaaagatcatgctttcaaggaaaattggccaatcatctatatcaacgaccactacggtctctggaaggctgatattcaagctgtgatggaaacatgcaaaaacgaaagaagcgcccctattttagagaaaatggcaccatctaaagatgattacttcttaattaaaccgaagcattcggccttctacggaactgcactagaaacactcttaaatgaattaggtgtacaagacatcattttgactggaattgcaggaaacatttgcgttctgttcactgcaaatgacgcatacatgcgagaatacaacttaattgtacctaaagattgtatcgcatcaaatgacgacagagacaacgaatatgctttaacgatgatggagaacgttctactagcaaaaatcaccactgctaaagagatcacgaatgaaaatcaaacatgatttatccataaccctcataaattgttagcaataacaaagggggcgttgactattcaaatttatgttgtcaaaagaggagatactttaaacgaaattgccatgcgctttaaaacaacagtcaatgaaatcatccgtaccaacgatattgaaacaccaaatcaactcgtcattggacaaacaattgtcattccaattagaggacaattttatgaggtcaaacaaaatgacacactttatcaaattggaagacgatttcgaatttcagtggaggaattggcacgtgtgaatagaattcggcctgaagcgatactacctattcgcttcttgctctatattcctcaaagaccgaaaaggaacattaattcgaatgcttacattgaaccaaggggaaatcaagtcagtgaaaacttaaaacaagcagctagagaggcctctccatatttaacccatttaggcgcctttagtttccaagcgcaaagagacggaacactgaaagaaccaccgttagatcagctacctcaaatagccgctcagagcagaaccgttttatccatggtggtgacaaacctagagaatgataaattcagtgatgaacttgggcgaattcttttgaataaccaatctgtcaaagccacatttttaaatgaaatcgttcgtgttgctaaaaagtatcaattaaaagaaatccattttgattttgaatatttacgtcccgctgataaagatgcttacattcaatttttaagagaggcaacaacccgcttccatcaagaaggatggacaatatctgttgcacttgcccctaaaacaagtagtcagcaaaagggaaaatggtatgaagctcatgactatgaagccatcgggaagatcgtcgatcatgttgtgttaatgacctatgaatggggatacagcggcggccctgcacaagctgtctctcccattggacctgtccgccaagtcattgaatatgcactgaccgtcatgccggccaataaaattgttatggggcagaatttatatggctatgattggacgcttccttacgtccagggcggccccattgctaaagccgtcagtcctcaacaagcgattgcaattgccagagagaataatgcctccattctatacgacgaaacagcacaagcaccttattttcgttacacagatgccactaataaagagcatgaggtatggttcgaagacgctagatcgattcaagcaaagttcaatctcatcaaagagttaaacttgaacggaattgcttattggaaattaggtctatccttcccacaaaattggctcttattatcagatcaatttaatattgaaaaaagaacgacatcgtaacccattcgctctatctctcggaaggggtatggtacaatatacattggtttgacaactttatagatagaggagaacgcctatgtatcctgccccttttattgcagtggaaggcccaattggagccggaaaaacaactttggctacaatgcttgcgaaggaatttcaatttcctttagtaaaagagattgtagaagaaaatccattcttagataaattttatgaagatatggaacaatggagctttcagcttgagatgttctttttatgcaatcgggtcaaacagttagaatctattgaagaaaactatgtgagtcaacagcagccgattgtcactgattatcatgtctataaaaatatgatatttgcagaaagaacattatcaaaaaagcacatggacaaatacagaaagatctatcacttgctaacagatgaccttcctaaaccaaatgctatcatctatataaaagccagccttcctaccttacttgaaagaatacagatgaggggacgctcttttgaagaagacatcgacccagcttatttaaaaacactcattgaagattatgagctggccattgaacatttaaaacagactgacccagggcttcctatcattacaattgaaggagatcatacagacttcgtttcctcacagcaagattaccagcaaattgtacagaacataaaggagcaagtactatgaacaatatcgaaataccaaaggatgcagtgatcacaatcgccgggactgttggtgttggaaaatccactatgactaaaacgatagcggacaagctaggctttcaaacctctcttgaaaaagtagatgacaacccatacttagagcccttttattcagatttccaaagatggagcttccatttacaggtctatttcctagccgagcgttttaaggaacaaaagcggatttttgaatctggtggaggatatgtgcaagatcgttcaatttatgaggacacaggcattttcgcgaaaatgcatgcggacaaaggtacgatgtctgaagtagattatgaaacgtatacgagtctattcgaggcgatggtgatgacaccttacttccctcaccctgatgtactcatctatttacacggggatttagatcatattttgaatcgtattgaagaacgcggcagagagatggaaactcaaactgatcgagcctattgggaagaaatgtacactcgatatacggaatggatcgaacaattcgatttatgcccagtgattaaaattaacattgaagattacgacttacttcatgatgaaagctcacttgaacccattcttcatgaaattgcttctgttatacaaaaaaatcgctctaaaacaaaataaaaaaaaccgctgcatttcgcgaatgcagcggtttgacaattccaatttttatgcttgcgttttaattcaactaaggtaaaaaatcaatatggcggaggaagagggattcgaacccccgcgggctttgacacccctgtcggttttcaagaccgatcccttcagccggacttgggtattcctccgtatcgacaagaattaatataccatatcattttaattcaagtcaacatcttttcgaaaaaaatttcaataagttgttttggtatgagaatctgcccataaaaaagcagccattaacggctgctcttgatctattttgtatcctgtctaatctcttcaataaactgattcatctcttctttaaactcatttaatgattcaataattttcgtaaagtctgtcacttgtttggcttgttcatttgttgagctgctgatttgtgagatgttttcagacaaagtgctaatactgtcttggatttcctttaagaaggtattaatggtttcagccgcttcctttgagccatctgataatttacgaacttcatcagctacgacagcaaacccttttccattctcgcctgctcttgctgcttcaattgcagcatttagacctagcaagtttgtttgtctagcgatcccgccaatggttttgacgacttcttcaatatttgcagatttctcttccgctcttcctgcctgttcgcttatttctaaacttgtggcagccagctcttgtgaatgcgcagcaatttgctcgattccaccttggagttctttcgctacatcattgatatgctccatataaccgcttaatttcttttcacgatgatgtgaaaatgccactaaaaaagatccaattacttttctatcttcatcaaaaatcgggtaaccttttacagcaatttcataaccatataaagactctggtaaatgaccatcatattcttgtcctcttaatgtcgtcgccacgttttggtcttctgggttcaatgggtccccaactttcacgccaaaatctattgtgttagacgggtagtaacaaagcaccttctctgtatcagtgatgccgaaaagaatactttcatctagaacttttctaattaattgagccatttcaacataatagtcaagcctattcaaggttattccttctttcctagaagcttttatttttttatcggctaaatttaggaaaactgtaggacttttggtaaaaagaaataagatgccatagcggcatcttatttcatcacttctttatttcccatataaggacgcagtacttcaggaataattactgtgccgtcctcttgttgatagttttctaaaatggccgccacggttcttcctactgctaaaccagatccatttaacgtgtggacatgctctggcttcgctttaggctctggacggaatcgaatgtttgcgcgtcttgcttggaatgcttcgaagttactgcaagaagaaatttcacgatacgtatcttggctcggaatccatacttcgatgtcgtatttcttcgcagccgtgaagcctaaatctcccgtacacatgctcatgacacggtatggcaggtttaatagctgtaggactttttctgcttgatttgttagtttctctaattcttcataagaatcttcaggtctaacaaatttcacaagctctaccttattaaattggtgctgacggatgagtccgcgtgtatctcttccggcagatccagcctctgatctaaagcaagcactgaatgctgcataattgattggcaactgttccccttcaaggatttcgtcacggtgcatgttggtaatcggcacttcagctgttggaatgaggaaataatcttcttctcggattttaaaggcatcctcttcgaattttggaagctgcccagtccctgtcatgctagctctattgaccatgtaaggtgggagcacttcagtaaaaccaaactcatcgacatgtagatcgagcataaagttatatagtgcgcgctctaagcgtgcgccaagccctttataaaaaacgaatcggcttcctgtgacttttcctgcgcgttcaaaatcaagaatgtttagctcatccgctacatcccaatgtggttttggctcaaatgagaaggccggctgttcgccccattttctcacttccacgttgtcatcttctgtttccccaaccggtacagtgtcatgagggatattcggaatagagaagaggatgtgctgcaagctttcttctactgttcttagctcatcatccagctttttaatctcatctcctacctcacgcatttcttgaataatgtgatcggcatctttcttttctctttttagaacggccacttgctgtgatacttcatttcttcggctctttaattcttctgttttcccgattagttctcttcttttttgatccagttcaccaaacttatcaaaatccgctaaatcttcgcctcggtgtgctaatttttctttgatttgatcaaagtccgtgcgcagttgtttaatatccagcatgtgtaacactcctttttttatcgaaaaataaaaagagccctcatcccatgaaagggacgagagctctcgcgttgccaccctgattgaaaacatgcagaagcatgctttcctctttcctctgtaacggtatcaccgtaaatgcttacttctcgtgtttcagcatttcgctcaaggatggattcagactgcatctttcaccgattcgcaccaaccatcggctctctgagaaagaggggcttcttactatttcccgtcaacgctttttcgatctttgattgtgattttaatgtactataagttttatctcttttcaaccgttttatacagcgagcttcgttttgtaagacttcaccatttcaacaaacagctgtgttaaccggtgatcgtctgtcagctctggatgaaaagaacagcctaagatattgttttctttcgccatcacaatcctgccatcatattcagccatgatttctacgctcacatctgcgctgatgatatgaggcgcacggatgaacacccctgtaaacggcgcatccagcccttttacttctagatctgcttcaaagctgtctacctgtctgccaaatgaattccgtgcaacagatacatttaacaatccaagatgggcatcttctcgatcttcaatttgttttgccagcataatcaaaccggcacatgtcccgaaaatcggtttcccttctgcagcgaacgctttaatcggttcaatgaattggtacgtatccatgagtctcctcatcgtcgtgctttctccaccagggataataagaccgtcaacggatgctagctcttctgctcgtttaatgatcttaccttctgcatcgcaggcttcaatcgattgaatatgctctctcacggctccttgaagccctagtacaccaattgttagcatgttcatttgcgctcccttaattaccagccacgctcttgcatacgctcttctggcagtagatttgagatttcaattcctttcatggctgttccaagctcttttgaaagttctgcaatgagacggtaatctgtgaagtgagtcgttgcttcaacaatcgcttttgcaaatttcgccggattgtctgatttaaaaataccagatccaacaaatacaccgtctgctccaagctgcatcattaacgcagcatctgctggtgtcgcaacgcctccagctgcaaagttaacaactgggagcttgccgtcttttttgatttgaagcaataattcataaggtgctcctaggttcttggcttctgtcatcagttcatcttcactcattgctgctactttacgaatctgagcattgacctttctcatatgacggacagcttctacaatgttgcctgtcccaggttcccctttcgtacgaagcatcgaagcgccttctgcgatacggcgggttgcttcacctaagtcacggcaaccacagacaaaaggtactgtgtattcatttttatttaaatggaattcctcatctgcgggcgtcagcacttcactctcatcgatataatcaacaccaagtgcttcaagaacacgagcctcgacgatgtggccgatacgtgcttttgccatgactggaatcgttacagcattttgtacttcctctacgattcttgggtctgccatacgggctacaccgccggctgcacggatatcagctggtactcgttctagtgccataactgccaccgcacctgcttcttctgcgatctttgcctgttcagcattgacgacatccataatgacgccacccttttgcatttctgccattccacgtttcactcgttcagttcccttattgctcacaatagtttcctcccatttgtcaattcgattgatttacctctttatcatacaagcgagacagtataacaataaagagaatagtataacaattcaatcagccgacaaaaaagcctaaacccttgtatataaacgatttctggctaaaaataagtcattttttctttgaagtgtgatttacatgctataatgcaactataacaattcaaattcatgtataacaattttgcactcaatggaggtttctcatgcatattgatatccatcgacattctgatacatctctttcgaatcagatttacttttcgatcattgatcatatccaatcgggtttgcttcagcagggagataagctgccaactgtacgtgatttagcaaagcagctgaatgtgagtcttgtcacggcagcaaaggcatacacacggctgaaggacgacggatatttaacgactgtgcaaggtaaagggacgtttgtggatgagctgcaaaagcagtcagatattccggttccgtcatctacctcttttgattggcagttatccattccggattatttaccacggtctcaatttgctcagtatcactatgtcgaagaagcgatcaacctttcttcctctatgattgatccagggcttttgccaaaccggtatttagaaaaagaaatgcagcatgtactagccagacatcctcaaatcatgtcgaagtatggggaaattcaaggggatcttcagcttaggcaagtcattcagtcttttttagaaaagctgggtgtgccttctactcctgaaaatatccttgtaactagtggttctcagcaagggcttgatttggtcgcacgtgcgtttatcggtcctgatgatgtagttgtcatggaagcaccgacttatccaggcgccattgatgtctttatgggcagaggggcaagaattattacagtccctgttgatcatgaaggcatgaacatgaagcagcttcaaagcatttgtgataaatataaaccaaagctcatctacacgattcctacttttcacagtccgacaggggccagtatgtcaatgaaacgcagaaaacaacttctcttactggctcaaagtattgattgtctcattgtagaggatgatccttatcgtgagctttatttcgaaaagaagccgccagcacctatcaaaagtcttgatcatgatggacacgtcatttatttgcgaggattaagtaaaacactggctccaggatgcagaattgggattatcaccgcctcaggctcgatatttaatcgtttattagcagcaaaggccaataatgatttaggcagccctcttctcacacaaaaagccattctgccatttctgacttcgaagaagatgattgatcatacgaaaaagctgagaaccgccttgaaggtgagacgtgatttaatgatagatgtattaacgaagcatgcaccaaaagatgtgacgtggcaaattcctcagggcgggctcaatttatggcttagctttccttcctgggtcgatacacgtgcactgctgcatgaggcacgtaagcagcaaattacctttctgcctggctctgtgtgctatcctggagagccgaagcaaaactatatccgcctcagcttttcttatgtgaatgaaaaagcactgaccgagggcgtggaaaagttatgtggtatttttcagcaagccttgtccactcctcaaaatcaaaaacaatcgcttttcttttaacgataaaaaaactgctctctatgcatgagagcagttttttattagaaccaaccttttactgtgtcaacgattccgccccaaatgccagcgaagaatccacccacactacgcattgcaaggatgaaccagtttgctttttcatcgcctgttttcgttataagctcaacacctgattgatctttattcaaatagccgtagtccttctcatcaccagaataagaagtcgtcagcatgccaaccttcgttccttttttaataggagcttctagtttctttttctcgatatttacttttgctttaaagctcttttcgtcgccattttttactggcacagagaaagcttctttcgtgacgacaggtacttctttgtctttgcctttatcgacttcgatgttttcatgtcctttgatctgttgaccttttttgtacatttctttcatcgtgaagtttttaaatgcatagtcgaacagttttttcgccacgtcgaaacgtgctgtatgaagattaccttttgcattcaagatcacagcaatgacacgcatgtcaccttgtttagcggtacctgtgaagctagaaccagctgaatccgtagagcctgttttcagaccgtctacaccttcatattccttcacaagtcctttaagcatgaagttccagttaggcatgtccatttcatcgtctgtgccttctctgaactttgttttcgcgatacttgatgtttcaagaatttctggatggtctttgatgagatgctgtgcaagcaatgccatatctttcgcagatacttcactttcttcatcaggacctgtaccttttggctgtttgccatgtaaatctttattttctagtccagttgcattcacgaatttgtagttagttaaaccaagttctttcgcttttgcgttcattttttcaacgaacttcgattctgatccagcgatcacttctgctaagccaatcgctgctgcatttgccgaataaatagccgttgcttgataaagttctttcactgtatacgagccatcttttctcaaaggaacgtttgataaactgcggtcctgagaaatttcgtatacataatcatctggcgtatacgtttgatcccatttcactttgccttcagcaatcgcctctagtaatagatactctgtcatcatctttgccatacttgcaataggcagtctttgttctgcgtttttactataaagaattttacctgtagaagcttcaattaggattgctgctttcgcattcacattgaatggatcttcagctgcttttgctttggacattggtgtaaatgctgtcacaatcaatgccagtgcaaggatagagaccataagctgtttcaacatcttgctgttcaatcgtcatacctccgtattcatcttttttcgacgtatttcatatatatttaatccacaagggcttatttcaacacaacagtataaattttatcacaataaagacaaaaaaaatagacagagtcatagaccctgtcaaatgtaatttgattgtcacaatttatcaagaaattgtgtagtttggtgattcttttgtaatttgtacatcatgtggatgactctcacgaagtcctgcaccagtcatgcgaatgaactgtgcatcttctctaagtgagcgtaagtcctgtgttccacaatagcccataccagaacggataccgccaacgagttgatacactgtatcaacgactggtcctttgtatggtgtacggccttcaataccttctggaacgaattttttattatcttcttggaagtaacgatctttacttcctttttccattgcagcgactgaacccataccgcgataaactttgaagcgtctaccttggaaaatttctgtgtctcctgggctttcagatgtaccagctagaaggcttccaagcattacagcatgtccaccagatgctagagcttttacgatatcacctgaatatttaattccaccatctgcaataatagctttaccatgttttcttgcttctgttgcacagtcatagattgctgtgatttgtggtacaccaacacctgcaacaacacgtgttgtacaaatagaccctggtccgataccgactttcacaatatctgctcctgcttcaaataatgctttagttgcttcggctgttgcaacattaccagcaatgatattaagagaaggatacgtttcacggattttcgatacagtgttaagaacaccttgtgaatgaccatgtgcagtatcaatgacaacgacatccacattggcttcgactaattttctcacacgagtcattgtatcgccagtgacaccaacagcagcaccaacaattaaacggccatgtgcatctttagaggagttagggaattcgatcactttttcaatatctttgatggtgatgagaccttttaacgttccttcgtcatctaatagaggtaatttttcaattttatattgctgtaggattttttcagcttcttctaacgtcgtacctacagaagctgtcacaagttcctcttttgtcatcacgtcgctaatcttcattgaataatccgaaataaaacgaaggtcacggttcgtaataataccaacaagcttttgatcttcttcgttatttacaatcggtacacctgaaatacggtatttacccattaggtgctctgcatcaaatacttgatgctcaggtgttaagaagaatggatttgtaataacgccgcgctctgaacgttttactttatccacttgttctgcttgttgctcaatagacatgttcttatgaatgataccaagaccaccttgacgtgccattgcaatcgccatttgtgattccgtcaccgtgtccattcctgcactgataattggaatgtttagttttaatgtgcttgttaactcaactgataaatcgacatcacgcggaagtacttcagacttagctggaacaagcaaaacatcgtcaaacgtcaaaccttcttttgaaaatttactttcccacattagtaaatccccctcttttcggcaaaatattatatgtagattatcaactaggaaacagcatgtcaaggaagcaacaaacagttgcaatttttagaaaatataaagagagttgaggaagaagatgaaaagttcaggatggaaggatttaaaacgtttttactcactcgaaacttcccaaaagtttctatatcaacaatatgagaaacggagcattcaagatgcaaaccagcaagcctataaaaactgtgaacggtttatttactttttaaagcatggccatacgttctatgaacaggcagctatcgctccactcgaactgaagcccattttattattttatggaatggctcagttgctaaaggcatgtttactgacagttgatcctcactatccttctcaaacctctgttttggcccatggcgtaacatcgagaaagagaaagaaacagcattaccgctttagtgaagatgaagtgaaaattcagcgaaatggactatgcatgcatgtgttaaagcatttatttcatttaaatggtcttgaagatgagcgatttacgatgattcatctcctttcaaagatacctgaaatgagtcatattctggagtttcaaaagcagccctcgacattagttaaagtggaaaaggttaatgggatgatgattcaagatcatattccattgctttataacatgtctgctgaacgctttattgaatactttgagttccatacaagttggaaactcaagcaaagagaagccaaaaagctgacgtttgatgtagctctagaagaaaatccagcgctcgctactcatcttcattatgatttagaaatggatcaatggtttattccgtcaactcgtgattcatttttagggattcctgagatcatcagccattacttattaatgtataacctcagtatgattgcccgctacgaaactgaatggtggtacgagctgctgtctcaatacattagtgatgattacgtcatgattgaacgctatatggagattgccgaagagaagttcccagcttatatcatgatgctgttagaagaaaacacaaaaaagaccagttccgtatggaactgatccttagaaaagcttggcggcgtcctactctcacagggggagacccccaactaccatcggcgctgaagagcttaacttgttctttgaaaactagataacaataagtaatacattcacattgaatgcaatgcaaagttcatcacacatagtgattctttctaaagtaagaaatggttaagttagaaagggcgcacggtggatgccttggcactaggagccgatgaaggacgggacgaacaccgatatgcttcggggagctgtaagcaagctttgatccggagatttccgaatggggaaacccactgctcgtaatggagtagtatccatacttgaatacatagagtatgagaaggcatacccggggaactgaaacatctaagtacccggaggaagagaaagcaaatgcgattccctgagtagcggcgagcgaaacgggaacagcccaaaccaagaggcttgcctcttggggttgtaggacactctatacggagttacaaaggaacgatataagcgaagaggtctggaaaggcccgccaaagaaggtaacagccctgtaactgaaatgttgttctctccagagtggatcctgagtacggcggaacacgtgaaattccgtcggaatccgggaggaccatctcccaaggctaaatactccctagtgaccgatagtgaaccagtaccgtgagggaaaggtgaaaagcaccccggaaggggagtgaaatagatcctgaaaccgtgtgcctacaagtagtcagagcccgttaaagggtgatggcgtgccttttgtagaatgaaccggcgagttacgatcccgtgcaaggttaagcagaagatgcggagccgcagcgaaagcgagtctgaatagggcgcatgagtacgtggtcgtagacccgaaaccaggtgatctacccatgtccagggtgaagttcaggtaacactgaatggaggcccgaacccacgcacgttgaaaagtgcggggatgaggtgtgggtaggggtgaaatgccaatcgaacctggagatagctggttctctccgaaatagctttagggctagcctcaaggtaagagtctcggaggtagagcactgattggactaggggcccctaccgggttaccgaattcagtcaaactccgaatgccgatgacttatccttgggagtcagactgcgagtgataagatccgtagtcgaaagggaaacagcccagaccgccagctaaggtcccaaagtatacgttaagtggaaaaggatgtggagttgcttagacaaccaggatgttggcttagaagcagccaccatttaaagagtgcgtaatagctcactggtcgagtgactctgcgccgaaaatgtaccggggctaaacgtatcaccgaagctgcggactgttcttacgaacagtggtaggagagcgttctaagtgctgtgaagtcagaccggaaggactggtggagcgcttagaagtgagaatgccggtatgagtagcgaaagacgggtgagaatcccgtccaccgaatgcctaaggtttcctgaggaaggctcgtccgctcagggttagtcgggacctaagccgaggccgaaaggcgtaggcgatggacaacaggttgatattcctgtaccacctcctcaccatttgagcaatggggggacgcaggaggatagggtaagcgcggtattggatatccgcgtccaagcagttaggctgggaaataggcaaatccgtttcccgtaaaggctgagctgtgatggcgagcgaaatttagtagcgaagttcctgattccacactgccaagaaaagcctctagcgaggtgagaggtgcccgtaccgcaaaccgacacaggtaggcgaggagagaatcctaaggtgatcgagagaactctcgttaaggaactcggcaaaatgaccccgtaacttcgggagaaggggtgcttcttagggtgttaaagccccgagaagccgcagtgaataggcccaggcgactgtttagcaaaaacacaggtctctgcgaagccgtaaggcgaagtataggggctgacgcctgcccggtgctggaaggttaagaggagcgcttagcgtaagcgaaggtgcgaattgaagccccagtaaacggcggccgtaactataacggtcctaaggtagcgaaattccttgtcgggtaagttccgacccgcacgaaaggcgcaacgatctgggcactgtctcaacgagagactcggtgaaattatagtacctgtgaagatgcaggttacccgcgacaggacggaaagaccccgtggagctttactgcagcctgatattgaatgttggtacagcttgtacaggataggtaggagccttggaaaccggagcgctagcttcggtggaggcatcggtgggatactaccctggctgtattgaccttctaacccgctgcccttatcgggcagggagacagtgtcaggtgggcagtttgactggggcggtcgcctcctaaaatgtaacggaggcgcccaaaggttccctcagaatggttggaaatcattcgcagagtgtaaaggcacaagggagcttgactgcgagacctacaagtcgagcagggacgaaagtcgggcttagtgatccggtggttccgcatggaagggccatcgctcaacggataaaagctaccccggggataacaggcttatctcccccaagagtccacatcgacggggaggtttggcacctcgatgtcggctcatcgcatcctggggctgtagtcggtcccaagggttgggctgttcgcccattaaagcggtacgcgagctgggttcagaacgtcgtgagacagttcggtccctatccgtcgcgggcgcaggaaatttgagaggagctgtccttagtacgagaggaccgggatggacgcaccgctggtgtaccagttgttctgccaagggcatcgctgggtagctatgtgcggacgggataagtgctgaaagcatctaagcatgaagcccccctcaagatgagatttcccattccgcaaggaagtaagatccctgaaagatgatcaggttgataggtctgaggtggaagcgtggtgacacgtggagctgacagatactaatagatcgaggacttaacctatattctaatgtgaagctgctccatatatccttagaaaggaggtgatccagccgcaccttccgatacggctaccttgttacgacttcaccccaatcatctgccccaccttcggcggctggctccataaaggttacctcaccgacttcgggtgttgcaaactctcgtggtgtgacgggcggtgtgtacaaggcccgggaacgtattcaccgcggcatgctgatccgcgattactagcgattccagcttcacgcagtcgagttgcagactgcgatccgaactgagaacagatttatgggattggctaaaccttgcggtctcgcagccctttgttctgtccattgtagcacgtgtgtagcccaggtcataaggggcatgatgatttgacgtcatccccaccttcctccggtttgtcaccggcagtcaccttagagtgcccaactaaatgctggcaactaagatcaagggttgcgctcgttgcgggacttaacccaacatctcacgacacgagctgacgacaaccatgcaccacctgtcactctgtccccgaagggaaagccctatctctagggttgtcagaggatgtcaagacctggtaaggttcttcgcgttgcttcgaattaaaccacatgctccaccgcttgtgcgggcccccgtcaattcctttgagtttcagtcttgcgaccgtactccccaggcggagtgcttaatgcgttagctgcagcactaaggggcggaaaccccctaacacttagcactcatcgtttacggcgtggactaccagggtatctaatcctgttcgctccccacgctttcgctcctcagcgtcagttacagaccagagagtcgccttcgccactggtgttcctccacatctctacgcatttcaccgctacacgtggaattccactctcctcttctgcactcaagtttcccagtttccaatgaccctccccggttgagccgggggctttcacatcagacttaagaaaccgcctgcgagccctttacgcccaataattccggacaacgcttgccacctacgtattaccgcggctgctggcacgtagttagccgtggctttctggttaggtaccgtcaaggtgcgagcagttactctcgcacttgttcttccctaacaacagagctttacgatccgaaaaccttcatcactcacgcggcgttgctccgtcagactttcgtccattgcggaagattccctactgctgcctcccgtaggagtctgggccgtgtctcagtcccagtgtggccgatcaccctctcaggtcggctacgcatcgtcgccttggtgagccattaccccaccaactagctaatgcgccgcgggtccatctgtaagtgacagccgaaaccgtctttcatccttgaaccatgcggttcaaggaactatccggtattagctccggtttcccggagttatcccagtcttacaggcaggttacccacgtgttactcacccgtccgccgctaacatccgggagcaagctcccttctgtccgctcgacttgcatgtattaggcacgccgccagcgttattgtgttgtcatttcgaatgtctctcgatccgacaaatagtattatataacgataagatattgtttgtaaagacttttttaaaataatttttgaatttattttaacgttgttttttcgtcttttcgttaaggcacctaaagaattctaccacttgtctcatcattttaaaagtctttttttcatctttttatgtttttttgttaaaaagggctctaataaagctttattgatgtgaaattacccttttcaagctttttatatgcttattttattcaatatatcttctcatacaaatcatctagagaaggaattcttttattattttatttttctgggaaatcattttcatgtaaaaatgtccttaaatgatactgttctttactatcttcaatattaaagtgttactagggtatcaagttagtgttgattctttcttattcttacttagagcgagcgaaaaattcaactgtaagtgttgcgatactcagtcatctagtgtgtctctaaacagtcctctgtatctggctgccaaagaaaattcttattagctgctttctatgcttttgatcttcatcctaaacgaattgaacggccgacccacaaacaacagctgcgttgttcaatgaaaatacatgaaagtgagacggacggaaagatcaacttatcgatgaggcatttactaaatcatcacttctcactttacaaagtgatttaatagaagtaattttttcaaaaacacaaaaaagaccagttccgtatggaactgatccttagaaaagcttggcggcgtcctactctcacagggggaaacccccaactaccatcggcgctgaagagcttaacaaagatggtcgggaagacaggattcgaacctgcgaccccttggtcccaaaccaagtgctctaccaagctgagctacttcccgatcttaatggcgcgcccgagaggagtcgaacccctaaccttttgatccgtagtcaaacgctctatccaattgagctacgggcgcttattttataatgccgagggccggacttgaaccggcacggtagtcacctaccgcaggattttaagtcctgtgtgtctgccaattccaccaccccggcgtggatggtataagcggaagacgggattcgaacccgcgacccccaccttggcaaggtggtgttctaccactgaactacttccgcattacaggatttctttattttatttggcaatgcgggtgaagggacttgaacccccacgtcataaagacactagatcctaagtctagcgcgtctgccaattccgccacacccgcatgaaacatggtgagccatgaaggactcgaaccttcgaccctctgattaaaagtcagatgctctaccaactgagctaatggctcgctttaaaagcgacttgtctatcttaccatatgaaagtggtgccggcaagaggacttgaacccccaacctactgattacaagtcagttgctctaccagttgagctacaccggctttatctatcctaacattatgtaagaataaatatggtggaggatgacgggctcgaaccgccgaccctctgcttgtaaggcagatgctctcccagctgagctaatcctccacgatataaaagatatggtggaggatgacgggctcgaaccgccgaccctctgcttgtaaggcagatgctctcccagctgagctaatcctccgaataaaaatactggtgtatattctataaaatggtgacccgtacgggattcgaacccgtgttaccgccgtgaaagggcggtgtcttaaccgcttgaccaacgggccctttattatgtaaattgtggcggagagcaagggattcgaacccttgagacggggttaccgcctacacgatttccaatcgtgctccttcggccactcggacagctctccaaattggctccgcaggtaggattcgaacctacgaccgatcggttaacagccgatagctctaccactgagctactgcggaatgaagaaagcctggcgatgtcctactctcacagggggagacccccaactaccatcggcgctgaagagcttaacttccgtgttcggcatgggaacgggtgtgacctcttcgccatcatcaccagacaatttagtgacaaaagatattatactatgtattgaaaataaatcaagagatattttaaaaatgttctctcaaaactagataacaatgttcaaactaaggatcagttccatacggaactggtctttttgtgttgcttgagaggatatttttttgattgcacttgtttgatgaacgtgcggcactccaactcatttacaagtatgtgagacattttaaatcaaaaagatagaacgttcatcatattataaatccttgttatgaaaaaactagtagagagatagagtattagattatagaaggggactgtatcaatctttatagttaactctattctaatatctataaaaactgcacctaaagtttgattccaaggaatacctataccatgaaagcataaaaataataggctgctgatatttctgaaggaattgaccgtttttaaagagaatatagagaggagaacttcagctgataaacgttgaatgacagcagtttgaatggagaaaatgaggatcatttgctaaaagaaataccaatgaaaattgaaataaaatttttttaatatagcctttacaaatgatgaaaacctgtatataataatctttgtcggatcgagagattcctacatagatggggccttagctcagctgggagagcgcctgccttgcacgcaggaggtcagcggttcgatcccgctaggctccactttttaaaagattattttgatcatggcggtgtagctcagctggctagagcgtacggttcatacccgtgaggtcgggggttcgatcccctccgccgctataaaggacctttagctcagttggttagagcagacggctcataaccgtccggtcgtaggttcgagtcctacaaggtccaccatctatacggaggaatacccaagtccggctgaagggatcggtcttgaaaaccgacaggggtgtcaaagcccgcgggggttcgaatccctcttcctccgccatattttttaataccccgttggtggagcctagcgggatcgaaccgctgacctcctgcgtgcaaggcaggcgctctcccagctgagctaaggccccgatttaatagaagatggtgggcctgagtggactcgaaccaccgacctcacgcttatcaggcgtgcgctctaaccagctgagctacaggcccatctttcatatcgaagatatgatgttgtaggatcttttgcaagttcgcggggtggagcagttcggtagctcgtcgggctcataacccgaaggtcgcaggttcaaatcctgcccccgcaaccaaaatggtccggtagttcagttggttagaatgcctgcctgtcacgcaggaggtcgcgggttcgagtcccgtccggaccgccattttta
